United States Patent Application Publication US 2026/0258423 A1 - sequence listing, part 69

SEQ ID NO: 301568 - DNA, 83257441 bp, Homo sapiens (residues 64,044,211-66,179,017 of 83,257,441)
  source 1..83257441: mol_type = genomic DNA
ttagaaagctcgggagattagaaaggggttagaaagctcgggaaatgttggcaaaacaccctttcatcatgcaaggaagagacagaatgtgagtgttggtttttggtaaagaaaaagaaaaaaggcttatgtatccaagaatccagccccgtcatctcgcctgctaccctcactcaggaggaggccttgaagtgagcaaggcccagccagtccagggggtgctcaggccttctgtgacagtcaggacctggagacactcctggccacctcaggaggagtaaagtcgcctgagattggagtgtccgtcccagtggggtccccgcatttgaggtatgtttatacatgtttacacacagtggctgcatcagacagggagagggccccacaaaagtcagcgaccagagaccatgagggacatgggccgcagagcactgcttcccggagcttcacctgcacctacgtccctgaagggaaaatcagcgtaagagaggcaacagcctgcagtttgccaagtccagctgaagccgcctagctcctgagagatgagaatgccagtacagataaaagatttataaagaatggatgaaaggaggaaggtgtccatgtcatggccactgggtctcctccccagcatttacaaactgcttaccttatttctcatggctcggaggagatctctgacagaaccacctttataggtcctgaatttacgcaggtctagaaaaacattgagggaagcaatgggtaatcaaatttaaaactaatacattttaaaagaaaacaattcatggggtcctgggattagggagttggactgaaaggtgaggtcactccacacctaggcatgggagcagatcctcccatccaacccaagggtggtatccccctgaaccccacctggtgatcacacccaggtcagaaatgaccacctagagcacgacaccatcactcacctgtcactctagggaacaaaaatgaaacacacatcagtgtaaccaaaccacagaggacacacccaagaaagtctcaaacctgacaggtgggatgtggggcctgaacagcctggagcggccatttccacgtttactttttggaaaggcggcagcgacttttgcaacctgccctctcacacgctgcagcatgatcacctgtctggagggggacagtgatgttctcccgccagtccatcttcaccacggctctcccgcctctctctaactgcttcacgatcgggccatccagggattccttttctattctgtcgctcacgtcctgtgagagaaacaagggcagcagatgatggtcagtgctggagatgctgagagctgtgcgactgggactcagtaacagatcatcactgacacataagcctgccccagagctgggcagcaggcaccctgccccctccctccctcatccatgactttccctgtgagctgctctgttcctcacgaagcacaggcccacagagagcttctcccatgtcagagaggtgtcacagagtacacctgcatatagaccacgaacgcataccctgaatttcacatgtgcacacacacgccatgtgtacggagccgcaagtgcaatctatatccaatgaaccaaaaccaaaaagaaaaggaaagctcagatttgatgtgcatcccgtgctttgtctactcactgaaacagggtatgctcaagcccataactggtggagggtcgccactcttccctccaccagtagaaaagacctgtgaagctgggccttcttctcaaagaggaaacttggtggcaagagtatgggctccagaggctcctgttgggattcaaaccttgctctgcatttgactttggtaataaggagagggtcaggaagcacccaagtatggcctcttgaagtcccaccagtaagacaggtcgacagctgaggacacagggagtggtgagccctgtctacatcaatgttaagtagccttaggagacccttttctcagagcagccttttctatgatgaagatgaagccagactggctgaactcctaatttacaattgtcagagagaagctgtggagaggttagattgtcaacttgggtacactgggaacacacgtgtctgagctgcaaagctgttacggctaaatgacctgagtggaagccaggtgtgttcgagagacatatgacctggagatactaagcatttaaatcctgtcccttggtgggtgaaggtccctttgtgtgggttttattcctgttctatattttgcgatcaaaatgacctggttagttttcacaagtccctggaagacatatggacttgagaattttcacattatgtccatggacacagtgaccaatccatatgctacaacatggaagacagcattaaactcttcccaacccgatccatctgaatggttgggccaggcagcgtcctccctaggaggcagggacacagtagtgaatgcagcagtcaagcactcctgtcctcgaggagcttacattctgggggcttccctctggccaaggccccagtcagaccccaggagagcatgatggtcacttctcagtacggtgcccaccaagctgcactctgcctggacccaaggggaaaagcactgccccacaagcctgctttcagagccacgtgctgggcaggaggcgttcgggtgagttatgttcaattcatacatggaagactttgaaaaacacattacctcttcaaaagtcacctgacattgtcacaaagctttaaaacagtcaaatcaccaaaggagttctaactttgcagaacctattttaagcaaaaggagatctgggccaagactgtgtaaaagatgatagaaacaaatacaatataagaaagcactgaaatttatgacacttgggctgggcctggtggctcatgcctgtaatcccagcactttgggaggctgaggcgggcagatcacctgaggtccggagttcaagaccagcctggccaacatggtgaaaccccatctctactaaaaatacaaaaaaacttaggcaggcgtggtggtgcatatctgtaatcccagctactcaggaagctgaggcaggagaatcacttgaacccgggaggcagaggttgcagtgagccaagattgcaccactgtactccagcctgggtaacggagtgaaacgctgtctcaaaaaaaataaaaataaataaataagcttatgacacttgaatgaaattatatgatgcctgagatttacttcgaaataacctggggtggggagagggtgaaggttaatatttattgaacctgagggatgaataaaggagtgctcattatagcatttaaacatttatgtattatatatttggaaattccataatataaagcttaaccattatggcacatccatatgatagaatactatggtcattggaattttagaactttaacatgaaagaaacttaaaatatcatgtacagttaaaaaaagggattctgaaactgtatatacggttagatcccaattatacttttatatatgaagaaaacattaaaacatcagccatgattatcttccagttttagggtaatgggcaatttattttattctttgtccttttctgtattttcaaaatctgaaaaacattaaatgaagactctggataaagagaacagacgtctctacctggaagaactggagctgcttctctaggctccagaagaacgggtgtttgagcacatgcttcgctgaggggcgtttctgaggatccatcgcaatcatcttctctatcaattcacgtgcaatgacgtcttctataaaggaggaaaataagcaactcatgactaccagtccaaagccacagtgaaataccaaaaactttaaaaagctgcacaccctctcatttatgattctatttacaggaatttattccaataaaataattaggaacagacacaaaacctcagccaaagaggtgagtcctcactgcatggtttgtgaaggaagtgactgtaaacatccagtatcagaggcccaagtggatacactacggtgcctccctacgctgggccatgagctgttaaagtgcggctgtgactaaatatggattgacgtggagagagattcaaggtgacgctgaaaaacgtgcatgctgcaaaacagtatgcaggatttaactgtatttttataaaatatgcaatcacgtctagataaatgactggaataacgtatatgcaaaggtatcaatagccatcattcatccctgtataatgggaatatatgggcctttatgctaatctgtgttttctataataagaaaaattaagcataaacaaaacaataatttagttgtaattttttcaaaaggcagcactggagtgtcatgggccaattaccacccaggaaaacctgaagtctggaagaaagacttgttgcacccataccaggagaccaggagggtgaggataaagcttgtctgtccccagcccagcacagactgcacctactgaccactcgccatcccaagagagaagacaatttgtcttcccaaatgccagtgcaggaagggacctctgattattcaaccctcatgtcaccaggtagaaaaagaaggtctccaaagggggctttgcctaggtcacacaagtagttggtgacctggaggaaccttggagcatctcagctttagaaggtggcgccccagagataaccctaccaaccctctaccagatttggcacaagtctggaggtcctgaggcctgcggggtgagcagctggggcaccacggcctctgtgagtgcaaaggtggcaccagcccagctctgcagggccacctgaggcagctgaggagctgctcccaaccccaacccctggaccgctcaccgtgcttctctgggtgcaagcagtcaaggctgcaggcacccaggaggatgttggcctgccgctgcagggacttgccaaaagggtggctgccctcagagattacgtagtaaaagacgcagcctgcagaaaagatgtccaccgtgtaggtctgaaaagagacatgaggcgtgagaggtctgggagcagagttttcatcctcactcacagtcagggagggaggagcattgctgctgcttctgccacctagaaggtgtcctgggagaatcagctgacatatgtgagctgcacagagcagcgagggctaacctgcagcactgcatgggtgtcagaggtcccagtggagaacctgggcttggagccacctggaagcccctggttccctctcatgtgagatgaggacactgacagcatggggctgttgtcaaaagagatgcattaatatgcaaaaatggttgcttacgacagtgcttggcccatcaaaagccctcctggctgttatatattccttacccccaacacgaaagtgctcacagacagggtctctgtgtcgttgcttccctgctgtacccccagggcccagaatggtgcctgcacacagtaggtatcaaaattgctaataagtgaataaaacagcttatgattcaaaaacagccctagaaagaaactatctgacaagttaccaaggaggtcatgtttgatgttaatccgagaaagcctctcacttatcccatgaaaccattctgtgtctacagaatagcttccttcgagggaaatgtacgtttgtgttttttagctcatgctacctggggtgtaataccaaggtggttcctgagcacagcttgggtccctgttagtaggccctgcctctgagattctccaccaggtgaagtgagggtctagtgtgaggaagcaggggctcatcacctcccatgctggaggagacacaccttgaacaacacagcactctcattcagcctcacaacaaccttgtgaggcgagcagagcaaatgctttcatccccagatgagaacgtggacagaaaggttgcatgacaagctcagggtcactgctggatgtgataaaccaggatgggactcaggtcttccaatctccaaacctaccatgctttattctacctcactggattttcccttaggaaggtgctggattcgggacaggaggaacatggccaccacagctggagctcgcccctgactcccagagctctctgggtctttcacgccccccacactctctgcagcctgctgtccccagcacagacaacactaaggtgaagaggcatctttcctacctgcctggccccaattatgttctttcccaaacttattattgccacttgtccttgtaatttggatattccataagctgttaaacatgagtgccacgaagtctgaggtaagctgaatctttagaaagactcgataaaggaaagggaatggttacaagagctgctgcggcatttggtgtggtggattcaaccgtaagggactgggtcatgaagcgttaaaaaccaggcttctgctctcaaatcgcttaggaagtgtttgaagtgtccaagcctccatgcagaagtcacagaagtggtacagaagtgtgcttaatgcaagggggaaaatgaggactccagtcagtcagacccaaatctgaaaagaccttagcctacagcacaagatttctatgacttaagggctaatattacttgctttaagttaaaattaagtgttacggcgtgcgtgcgtgtttttatgattcttcgctgtaactgacttctttgatgatctgaccagctgctggtccccagtgagctggataagaggcagccatatctaatccactcaagatgactgacccacccaggtctccatcggggagtgtccaaggtgagcctcggcgacttgtgctagaataaggtgctcaagtgtgagtgcgctcccagcaaatggatgcagaagccagcttgaaggggtttccaggttggccaaatttggaacaatttgtgtatcaaaagaagtaaataacaaaaaaaggactaaaatggattataacattagtttcaaaatccttgagcccatagcgattaagaaaaaaaaaaaagagagagagaagaaagtgaaaagaaagctctgctttacagaaaaatgtcagctaacaatgtagaagaatttctactcaactgagtacttcaggcaagggtgatcaacacatgctaaaccactgggtgagtgactgtcagtaaacaggatattcacattgtgctgaagtatcaccccaaatactaacaagagaggaggaaatgaacccttatggtagagagatcagctgtagcatcactaagaggaggtgataataatcttacagatacaatctgccatcacatgctttctgatgtagagacctgccaaaaacattcgtgccaaaaacatttaacttgaacctaatcaagcctctccacctaacttctggtttccaggaaatacaaggaatacagagaaatgttcaacgctgtcatgaggaaaaaagcaaacaaaccagaatggggcatcctataacccactgcctggactcttcaaaatggaacttcaacatggaacaaaatataggtggaaagatttgtaaattccaagagacagaatcaaatgtaacgcaagacacctgattccatcctggtatataaaacccagtaggtatcaaaacccagtaggtagcaaaataccaactctataaaagacatttggggactaattggggaaatttgaatatggattgaatatgagatgatggatagaaacagtattaactgttgaggtgggataatggtattgtggttggaaacacaatgtattccttaggagacacgtgctgaggtcttcagggatgaagggccaggatgcctgctacttatattcaaatggttcagtaataggtaaagataaagcaaatgtggcaaaagtattaacaaatgttgaatctaggtggagatacacaggtattcatgttaacattctttcagccagatgctgtggctcatgtctgcaatcccagcactttgggaggctaagcctgagcccaggagttcaagaccagcctgggcaaaatagcgagatcgcacttctaaaaaatttttttcttttaattttctctatgtctaaaaattatcaaaataagttgagaaaacaaaaacaaaattttaaaaataatgaaaacttgaagtttgctcacgctaagcaagccctgacttcccagtttaccaaaattaaaaaggggttaaaaagtgattgatttagctgggtgtggtggcaggtacctgtaatcctagctactcaggaggctgaagcaggagaatcgcttgaacctgggaggtggagattgcagtgagctgagatcatgccactacactccagcctgggtgacagtaagactctgtcacacaaaaaaaacaaaaaaacagccaaccaaccaaacaaaaaaaaaaaacaagtgattggaagaatagggaaaaaaaatagataattgcccacatttgcccctttaatcagctgaacatgagatgacacagaatgttcacacagaagctcttggtgaaaggaatgccattctccagctacacgggcaccagcccccaaacctggaatttaaaggttctactcctgaagatacaatgggctggttctgtagttttcaaagggccatagcctattactcacagggttctccttacagtcttcgctcagcatctctggagcgatccagccttctgtgccaggcaccccagatcggcggctgaaactgtgtctgcccactgccagcttcttgcagaggccaaagtcggagatcatggccttgatcttgccgtgtgcattgggcatggatatgaggatgttgtgtggctttaggtctctgtgaactaacagagaactccagattagtccaatgcttaccaggagcaaccccaggcctcctccaatggggaatgtgtcctcgtcagactcccaatatgcctgccgccacctccaaatgttctgattttcaactatgtcggattcctcctcaaattcttacaccactcatctttgctactggtgatatagccaagagcttgaacagaagcaaggcccacccgagctactggttagccccacctgggccactgattctccccacccgggccgctggcctggtaaagtgcagcctctcaccgatgttgagggagtggaggtgggccaggcccgaggtggtctgctgcagcaaggtgatgggctccaggccgagatgcgcaaagtccttctgctccacatactgcaaaagacatgacagcaaggtcacggcacacagtcctcaggacttggcccctcggctcactttctttgataccattttaagaaagaaatggcaagttttactgacaacattctgtctaaatccatgttttccagcaaggagcaaacctccaaatctactaatttacaatgagaaagataagaaggcaagaaactcaagttcattgcctcatataagtaaacctacaaaggaatccaaatgatactgatatggtttcaaagtgagcctggaaaatgagcaaaaggagcttgctggatgatcttaaagcctggagttaccaactggcatcctccaagcccacaccagccatgactgaagagggaaagaacaactgtccaggtttcctggaggcaaagagggagagacatgccaactgcaagcagactgcccaggcatgctggggggaccaccctgttacaaccagagggataaaaatgctccacattttgactgtgtatgtggttaaatgggtatagacatttgtcaaaattcatcaagctattacatttaaaattagtacaattcactgtaacttttttttaatttgacggggtctcactctgttgtccaggctggagtgcagtggcacaatcactgcttactgcagccttgatctcccaggctcaagcaatcttcccacctcagcctcccaagtagctggggctacaggaacacatcgctaggcctggctaatttttggtttctttgtagagatggggtttcaccatgttgtccaggctggtctcaaactcctgagctcacgtgatctgctcactttggcctcccaaagtgctatgactttaataaagttaacaaaataaaaaaaataaatccacctcttgcagggtggctgcacacagctcgatggcaatgtactggaattgccggtccttctccgtgcagaagtagcggatcacgttcgggtgctcatccgattctcgcaacagctggacctcacggtctgcgaagctaaaacactcggggaggatcctcttcacggccacgtcgcggttgtcaaacatgcccctgcgggatgaggagtgggagttgtgtctgggaagcacgagtcaggctgtgtaaatgaggtgagaacctgggtccacagcattcacctactgcctcccagcctagagagccccgcctgactgcctggtggccccggaatcatcgcttgtctcagtgtgcaagctccctggaggccggactccatgcgtctaggtcactgctttgaccctgctgtgctctgagcctggcaccaggctcgcaacctgacaggcacttagacaccaggcggtgagggcagggggctggctaatccactcaccggtacacaattgtgccctcagctccatggcccaggacatccttgggacagaaggaaattttcccaactatcaccacgctggtttcctcatctgggacaaaataggaaaaagagattgtttcaaacagatatcacctaaagaaccttgaggttaacatagtgacaagcttcctgacctcagattaaaagatgggatttaagaggcactgcaccccagactgctgctcagcaagagcctgccaggcccactccccatgtacacccaggactgcctcttccccctgcccctgcattctgtctccgcctttaccttattgtgcgattgcatatcttaaaaccttctggaaggcagggattctccatagcgtttcacacacttatacatattcattgtgatatagttagaatggtttaatagttaacaaccaccacaaagtccactgtaaagatccgcactgaagcattcaggtggcggcaatggacatgtaaaacgaggagactccttgggacagagggctctgagttccctgcaccagctctgtgccagttccctcagaattggggctctgacaactggcttgagccaacttccacagaggaaagcagaccaactgtgacacttccacacttggccaccggctggccctgggaactctcttcagcccaatgggcagctcacctctggtcagccgcgacgcccagcccttgtggagaaagacaggaggatggccagggtggttcccagaaggccctctgaaggggagatgccaagggatggggcagaagccttcccacagagacccccagagtggaagttagaggagaacacagtgaacccctgagaatggtagtttacaatcttatggagactccttggacttctcaggaggtgctcgaataaaacataaaatagcaccaagatggcaactggctttacctccatcgtcttgttccagggaggggctgctgccagccttggaggcagagctgccggagcagagcgagtggttggaggccctgggggacgtgctggggctgctggtgcccgagctctctgagtacgggccagacgtgtccaggagctcgccgtcctgagccgtgtctccaggtgggtggaagggcagctgctgctgctgctgctgcaggagctggatcttctccagttccttctggaactgctggtgctggagctgctgctgctgatgcatgctctgggaagagaaacccacatccagacaagggcagctgttcccacagggaaacaagcagctgggaagggacaggtcccagtggcggagggagcatgtgtactttatgtgacccaacagggcacaaagagaccagtgagaaggcacctggaagcagaattgcttcgatgactggacgtctttccaccgactagttagatccttgctcatacagcccactccccaaccctaggaggggctggatggccaccaggggagggactgtgccctaggttgagggctgtgccagtttcattcagttctaaaattctgtgattttcatgaaagtctgagagttgttgcaaaggtgaaaccaaacaggaagcacaggtagcatggctgagccagtggtgggtgagagcaagccccaggttcgccacccaccgtgtctgtgtgttggctagaggctagcgcacagacactcagtaatccagaggggcaggtgaggaagctctagtattctaggtatgcagagtacatctgcatacacatagccaggaggtggcagtggggctgacacatggtgagcctggctgaggtcctgcttccgcctttcatcccactgccttccccgaggccacatgcctctcaaatactctgaaggattcattctgtcattatctgaagtagcagcgatctgtgatcatccctacccatgtgcaggaggtggactgaagggacttctgtgagccaccaacccaccagggagtcgtctcttcttctctccaccatggggtggagtcctagaaatgccgtctactagctgggtacccgtggggaaagttacttagcttctcagggtctacttccttcttttgtggacaagggatcaataataatgacctcataggactgagtgaggtgaaaagtgaaactatcaggtgcagacgtgccagtggggagtgccataaagagtctgtcattcccattcctgggcgggtcattagcttcctgagctctcaggtaacagcatctcgatgctctgagcaacctgctgaaggaccatgcccctcacatatttcatcccacccatggcctgttctgctacagaacttgctcatttccaactaggaagtaaagggatggccacactgcctttttcacacaagctgatctcacaggcagcttcttttttctttttttggttcttctccccagcagaagttctaatggcagtttttaagggaggaaaggtcttcatctattatccttattctttaaaaatacagataactattcaaaatcatctttgagcaaggcttataaatcagctcttagctgaaaaacactaagatttaggaacaaaattgtccttttctgggaggctagtgtctctttaattatgtttttgaagataaacaaacactgactttttttttctttttttttgagatggagtcttgctctgtcgccttgctctgtcgcccaggctggagtgcagtggtgtgatctcagctcactataagctccgcctcacgggttcacgccattctcctgcctcagcctccagagtggctgggactacaggcccctgccaccatgcccggctaattttttgtatttttagtagagacagggtttcactgtgttagccaggatggtcttgatctcctgaccttgtgatccacccgcctcggcctcccaaagtgctgggattacaggcgtgagccactgtgcccgcccggccaacaaacactgacttttaaatggggaaagaaatgtgctggttgtttttgtctggatctcactgacatgaggcgacaggcagagaagccccagaaataggtggatggcaaaggggaattgttgagctttaccaggggataggtgatgatgaaggccacccagccaatcagcaggaaggtgctcaggatgatggtagccatgtccttaagcatggagtccacgggggcctcgggccgggcaggggcatgggcgggcttctcctccacatcccgagacacggtggtaggtgcgttttctgaagtctggtcaaccaggttgataaccttgcatgggagagagttgcgacatcactgcaaaatttctagccagatacagatgaggccagcaatcaagagaagcaatcactgtttacaaggatatgactgtactgcagggggttttatttgttttaagctcaccaaagatcatgtagccagataactgttgcctctttcaaagcaattgctttgagaggccatgcatctttgcagtgaggttatcattattcaaaaatagtttttggagcaatacttttggcaggtgtcttcagaccctacatatttttttcaaaaatcctcaaaaaggcaaacacttcctcctttgatggtaggttcagtatccaggaaaacactgaagtcatctgtaacaaagtctggtgaaaaattggtatttgatttaataataccatttcacattaaaaggaaatccgcacgtatacagaggcacatggctagaaagcaataaagcagttttctcgtgttgcctgtaaactgtcagtgcaatcccaaaattataatttattccagtagtccactatttcttcaaagtttttaagaagcatcagaagcgtttgttaaagaaaatttagaagcccaaaattaaatcagataaaaatggagcttccctagagttcctcagaatctctaagacttcacggaacaggcatttagaaaaatgcattgactcactttcaaatatctagtattctaggtatgccgttatcatttgcccaacaaaactaacacagcctccctggcacatgctgaatttcccacatgctaaacctcccacacgctcacgccatttcacccctccccccagatggctgcctagaatgttcttctctcccctccaggtgtacccctcttattcatgcctctcccacagtgcctcccacatttttgggggtttgtagcctgcagagtatataggaagcacctgggcatgtggccagggacatctgtatgtctcatcaccatacagatgcacctgagagtattttaaaacatactttttcaaagaccgttatccaagaccagatggttaaatacaaagatttgacacgtggctacctctgggtgttaaattaagggcactgtcttattttcttctgtatgtgtttattttctaagtgttcaataatgaatatgcaggactttaataagattataggacaatgctgtttaagattgctgttttaggaatcaatgtatttctccaacctggctacttccgtagatgatggtaaacagatactgtgccctggaatcttgaaagtctacaatttcctttgtctctggataaaatctaaatctctcaactgagtttgttgtgcttttggtctcggcatcagtcagccattctcttcttcttctgaccctactcatgtagcccaggtgcatctctgtccctgggccctccatggcagggctgctgaagctgccaggcctgaatcggtcactaagcctcagacgtcccctcttccccttccctggccatgttgggttccctcctgcagagccacccttccacctcctccaccggctctgtgccccagaaggctgacctgtatgggccaaagcaatggcttccccaaccccctggggtttttgactgggtaaagctaacaggggacaccagcagatgagagagagaggtaagagaaagaggttgacttctgtggggctgctgaattcctcaactgatgctttcagctcccggtctagagtcctttctactccctctcctctggctttaggccaaggtgtgctaagagagcccctggaactctgtgcaaatagtcccaggccactctctgtctgcttcataaaacttcagatctcatcacttcttcaacaatttttttttttttttttttttttttagcaatagggtcttgctatgttgcccaggctggtctcaaactcctgggctcaagcgatcctcctgccttggtctcccaaagcactgggattacaggtgtgagacacccaacccagccttcaacaactcttaaactcctccacagggcttgtttcaggccctgtaacatggttcctttttacccatgtgagcccatttcctactaccccctacttagtagcctcgggtctggccaggcctttctccccacagcctgtgagctgggcacaccagcattcttcccactccaggcttttgcccttgctgttccattccctcctgtgccctcttgctccctccacctggccaaatcctacccattcatccaggtccaggcctagcttggtcctgctgcctttcctgcaccttctttcacaagttgcttcctattcctctccactagcccttaaccatttatgttttttgctttggattctggtgcattcctcttccctcccagactaggctgcaagctcagaaggcagagtcaaagtctaatgcctcaccctcccaacacctaacaccaacaacccccgactggtcgcttcctcactcacttcctcaaagctctttttctctgaatcagcaggaatcacattttcccgatgtttgggtagattgttgggaaatctctccagcatcttggtagacgcagacagtggggtttcatggtgtcctatgacaggaaacaaaacctttagtgagaacaatttcccgagctgtggtggcactcaatgctaaacttaggcaacaggtgctacccactgaggggtccacaatgcaaactctcagcaggactgtgagttagagaaaatgagtggcagttaccagaaaattccatcaaagcaggacccttattacttcatggcagaatacagtattccaagtctcctactgaggagtgaagaagtatccttgcatgacagggatcaggacatttgggaggcaccagacgcaaggctcgtggggctgcatgggcccgatccacaggtgaagtatgatgaggcttcattaaaagttcaaggagttctcctttcaatgctttttcctgtaacatcactcttctatggccgccgaattcccatcttggtatttaaattgctcaggtggagttccagtcctactattatctaaatgtgagcttccatcggggaaagtggtacattacttgcgagaaagcagtaggacacacctgctagatggatggggccatagcttgctccacgttcatttgctgttcactacacaactatcgcatggctactgagcattcattacacatttattgagcatctattgtgtgcaaattgctgtaagagatacaaagctgactagaatagggaactgggatttgatagggcttgataatccattcagctctaaaaatgagtccacatactgccccaaagagccaggtcactgtttcagattaggctgccagtagcctggctgactttcctttctgttctctggctatgagcagatctcactctgactcacgtctctttcaccttatgatctttccattgttcccctaaacctatcaaagatttcatgacatacatgccaagatgacaacaaacaggaactagtctaagctgtgtacatttcttgatctggaaaattcctctttgagttcccatctttaggtcagttctctatctacaacataatatcattctttaagggaaacctacttttgttttgagccaccactagtttctcttgtgtaccaaggagctctgagacatgctttgcttgggagcaggatttctccacttgtggtctgcccacttcagaccactgaatcagacttgctggtagggcccaggaatccgaatgtgagtatgtgcgggtaactctgaggctcactaacaagagacctacggtctaagaaaagtgaggtgttcttccacatgccacgctgtgcagcagtgtcctgcccttcccacaacacccactcagtgctcagggtcctacctgtctggtaggacacctgccaagagactgctatggaaggcattagcctgaatccccctagttcttctgtcaaccttcttgtaaacaggcttctcctggagctgggccttcactgatatcacgctgtacacactggaccaaccactgtacaaccttactcatgagaccactaaatattttgtacaaatattacctggtctccttgatgtattcatctatcattatctcttaggtccagattccagagcaaaaagcagatggctaggccctgccccagacctactgaatcaggctctcccgggcttatatatgcctagttaactaagctctgatgccgaaagcacccaaggtcagggccatggctttggggcaacccacagaccatgcctctcaagctaattggatccttgtattttcacgattaatgacaacctggaatatctttaatgctttccacaaagagaaaatgaaaggacatatctggacatagtagggcatatccttttacttgtggccctcgtcaacaggagacactgccatagtctcagtgccatattttaagatgacgagctttggaggtcctcagaagaggctttcgaattgtgggatccttacacttaatagattccttatactttgctgttttcgcagtttccttacttggacaacctttccattttaaagggatctcattttacaagttaaccatgaagactccctgcccccatattttctgtattctcatatatacacatttccttaattccacttcttaatcactggtgggcagtctgtgagccccttaactggcacataatgctgagcagccttgtaattgcaatgacctcttctcattagctatttttttctcaccatgggcctattcatacatgctcctccaactacttctgttaataaaaacgtattattattttgtcatctcctttacccgttatttggtaaaaataaaataaaaatggctacaaggaaacaggatgaaaaaagaaatggaccttgacaatctataaaggaagcgagcagggctcaaggatacctggtttccccccataatacctggttacacacatccccacctacaccgcactgcctggcagatcctgctgtttcctggtccccacatgctcccagctgccccacatctcttttccagagccccagccctgacctctttctcccctagtacctgtcaccagcaagcacgacaggaagagaacagagagaagaaactgcaccggcccctgggtgctccagcacccgactgacctcctgccctgctctgcccctactggggctgggaggtggcagaacagtgagggatggggcacaggaagggcagatggggttcaagaaaactccctcctgctctaatgacttggcacacttgccaggaacacagctcttctcacttccgccttcgtttgtcacactcactgccaactcaagaagtgtcatctcaacttatctctcttgggacagggcctctagttcaatccctggccattagtgatggcagcaaaaacaagagaaagaggaaaaaagggaccttcccacacacctgggatgacactgccctagaaccacaaccagcccctgactctgctgctctcaatccatcctgggatttaatccctcccgggtcctcagccctcgcctctccaacccctcaccctcatgcccacgtggactccaagttaattcttccatagaaacagtctcagttttcttaactataaaatggaaatgacaagggtacctacctcacacagggttgctgtgaggagtgaggaaatgcattctaaagggcttaatgtcggatactcacacaaggtttacattaatttagtacctgagttttggaacattaaacagttttcaaaaactgactcagaaacacagctaccttgttgattttccttgggggtaaaaatgtcccaaggtctcaggggccagccgggaagggctctgagcacaaggccttccgagctcagtacggtgtaactaccagggccggcggtcgcccaccaggaggcagcacgctgtcacctcaggctactgtgggagacctgctcttacctatcagaagccagtaattcctcaagtagttgagcttgttcttgcttttgagtccgggatcaaacttgacgtccgtgctgggcgtgatcacacactcccccttgtccccaatggtgacgccatcagtctggggcccttccagcaaaggaagtgtgctgccgcggggctgtggagagggtgcagtgagggtcaggagccctggagggagagcgggtcccacggcacaccatcccagccactgtcctgaaaggtgagcaatttctagtgcagggctagtccaggacagagcaagacacaaaggcccaaagtctgggcaaagaagcttctccctcaggatgtgacaagctgcactgatgtctttatggacgtctttttagattcttatgtctgggtactggggaacaagaagtgtgtgtgtagaactccaagaagctattatgagaagcagacataagtgaaggagaatgaatggatatctctgttagtcacaatctacgcaaccaatggggcggaataaagtccagccacacgcccagtgctggctcaggtgctgctggaactatgacagaggcaggcgctgtctattcacagaagcagccgcccaaatcactgggaagacaagagagccaaccacacagcccaagcattgtagggatcaggacaaacagctaggattatgacgccttggactttcagagacagaatgcttgaggcaggcttgtgaggcccaaggaggctcggcgagattgcaaaagcatgcaaagggtttgagtagggaaaaggaagaagaaagggcatttgaagtgtgaggtgaggagcagcctgaacaaaggccccggggaaagatgaacatggggcttgtagaagtcagggagaaggtgcacatggttgggccacgcaactcacatagagaaactaacagggtggaggaagggcatcgtgggactggatgaagcagggccatgaacaccagcctggggagtttagatttgatcacaaaagcaaaagggaataatcagggattcctcggctttaagaagctgtttttgtcatgtatctttctttcaaagtagaatgtggcatgtgcagaaactgtttttgagaacttaagatttgtgtttttcattcttaacctgcaggatgctcatgcatagcaaagtcattctttgctaaaatggaacagaagtggttaggcagctgcgagccctccgtagtggacttaccacgacagcaaccccctcgtgtaccattgagggagaggcatagaggctggtagagtatttcccaacatacagagtgggcctaggagaaaaacagatacatgcattccagagtcattgaatttccagatcccacagaagggagtaatcatcaccccaaataccacccgcagggatgaccacattaaccccccagacatggaggaacgcagtaggggtgtgaagctaggggcactgccctgggaacaggaccacaggacttcatcccagctgtcactcactgcagaaacatggacaagccacctaatggcaagcctcagcaaaatcgcagggctggactagacgatgcccatgatgcctgcagaaaggactacgcccagtggccacagaggagactgagtgcttactaccaccgccgaggcccctcagatgactctctacaacacactttcactccagcgatcactccagcgaccaccagaactacccccattctgccttgtgctttctaaggatcctggaggttttacagaactcctgagaaatggtcagctgctctactctggatgctgagagcaaaagggatgcataagaaattccagacttggtgagacttctggttccccagctgtgtagtctgtccccatgtgggacatcagggagacagaaaatggtgagagctacacctcctggcccttctgcttactgtcaagagcccacctgggatcggtcatccactacattatctaaacctctctcaacgaataccttacatttgaatgctgttttacaatctaaacacttgccggcatattatcttgtttgatcttccacacaactctatatataaagtaggaaactgaggcttggggagtttaagtgactcggtgataggctatgaagagggggatggagaacagaagcctgctgagtcttggacacacacacacactgtaactattttttctgatttttaaaatgaatataacctaaaaacttagaaaatatagaaagttaaaaaaataaatctcttgcatccctaccacctaagatagatccaaactatacttacactggcagtctctttcctatacctttatttgtgtgtgtgtggtggcagggggagggtcttgccatgttgcccaggttggcctcaaactcctgtgctcaaacaatcctcccacctcagcctctcaagtagctggaattacaggtgtatgccatggtgcccgacacctcccatccatgatttttatgtaatatttaataactctgaagtgttaatgggtgcccctcagctcttgtattctgaggtttccaaatgaaacagtcttggctctgaatattcctcatggcttcagagactgccctgtctttggcctcccgtgcagggcctgctacactgcaacagcaccagaacacgaaggccacggccgccctctccttccccgagctcccaactcacgtcagcttgctcttggcctctgtctccttggggaacgggtacttccactttgtgatgcgccccacctccccagacatgaaggtcagatagcgcagggtctccacagcgacattgatgtgcatcaccttcctcagaccctcccgctgccagacataaaaggccaccacaggggaggcgtagttttggatccacaggacgtccccagattcactgtccacagtcaccaccagcccatcaccattggacacaaagtgggacatctctgtacagatcaaataaacaaagcatgctgagtctcaccccatcttgcaaccacatcctctactcttgtggcaggctctagtcactcagttagaggaaacaagacttctggaatattctcagatctcctctgagcaatttcacttgtttccaatgaactcgcttagtctctgtaatatcaagacactgagagctggctggcgtataaacacaagccaggatcactctcccaaaggcaatttatttggtgatgttctttaacactctattcaataagtgagagtaaatactgaggaggaaggagccagtggagatgcctattaatctggcatttcatagcagtcacttgaaacccatcgatcaaactgaaagtcagggacagctgtggtggctcatgtctataagcccaagaatttgggaggctgaggtaggaagatcacttgagtccaggacttcaagaccagcctgggcaacatagtgagacccccgtctctacaaaaaaaaaaaaaaaaaaaaattagccaggtaggtgggggagtggcggtacgtgcctgtggtcccagctactcagtaggctgaggtgggaagatcgcttgagcctaggagtttcaggctgcagtgagccctgactgcactcctgcacacatcctggggaacagagggagaacttgcctcaaaaaaaaaaacaacaaaaaaacaccctgaaagtcagacctgaaccactgacactgtcccatcagattcacaaaggagtcctcagagaaaaacgaaaatattctaggtccttgacaagaaaaagcagagtccaactttgataccaatgttaaggtggcaaattggtttttagttttcatttgagttgggtgaatgttaactgcagaaataactagggatgagtcacatttgcagagtggccttcttgacagggttgttaatgtcctatgctgattttacttctactttccatgggcttgcagtaaattccttctgtgacatagaaagactcaacgagggatgtcctccttcctctctggctaagcttgtcaccattttacttcggtttcccttcagacttcaccaaggcccctgcacattgactgtgggaagtatttatgataagcccatgaaaagtccatggaaagaaagaacctggtgacaaagagtatcttaaaagaaaatcctactttctggagccactgtttccacataggtcaaaagtactggcccaagcttgtgaaatccagcagagagcacttactgtagtccacgtcgtcctcaggcagtgaggccgcatagtcaaagtaggtggcattccaccggagctctcgggttttggtgtcgtacatggtgatggtgtattctaaagaacacagaccagccagcccattaccacggaggggccatagtacctactgaggtgtggtccttatctaattataacaaacaaatcctccctaaactgtaggccaaaaagtccagactatccatgtcgatagagaaaggcaatgtgaggagaactgaaggcccagacacatgagtgaaactggctgacagcatgtggaagcagagacgacccaccctcgctatgcccttggactcatggctcacagaagtgtaagcaatagaatgttgttgttagccattaagcttcggggtgccttattacatagcaatggattgctgacaattaaaaattggcaccttgaagcaggatggcgccataacaaacacctaaaacatgtggcattgactttaggaccagctggcaggtggaggctgggaggctgataaaaaggttggtggagacttgctagtgcagagggggcactgctattgaaaatggaaaaggggtgacccagcttgtggagggtgccatgatgagcatgactattgcttgcagtaacttggaagacagaaaaagtacctaatcaactcagggatccaactaaggagatttccagacagaaggcagaaaatgttgaatggtttctcttagctgtctatgatatattgtgagacaaatgagctgaggaagaaatcattcagcagaatacagaggaactataaagggtccaggactgaatatcgctggaaaagattctcaatataaaaaataactttagggaaaagatcaaatccagggtactgccagcaacaaaaaatgggctcagggtaaagatcaaccaaatcaaagttgaagctgtaagatccttctttgagacctctgaaagattttaaggtggtccctcatagaccctctgcccccatcaagggagttctaaaaaccatgtgttgtcccattgcactcacattccaaagtctagaaacttgtgggtatggcttttatctaatggaataaattataatttgacacatgggaagcccacatagtttttaaaggagtggtatcagcatagactaaaaggaacagagacagtcaaattgaaaaaaaagggcttctagatccccaaatttcaatggacaaggaacggactgagaaagatacaaaactggccatttgttatggaaaagaaaggacttctcagagggcagaaccaagagccactgagagcactatattagggaaccaatcccagagggcaaaactgggccctaatgaaggaatattccctacccctggaggaggggaacctgaaaacatgtgcctggctggatttcagaattactaaggcccaatgtgtgatatgtgtctctctttcctgcccttttttgagtgaacatgtttactgcagctatcctgtctctgtctcaccactgcatgttgggtgggggatgggaaggggagaaagaccctgtctctttaattcacaggtctccgatcaagaggtgccacacttgaggagcatcatctacctccagacctcatgcagataatgagaggtgagattttgggactgatgctgggattggactttgggggtctttggagggagtgggagggttgtaaactactgcagcctgagggaggactgcagtagaacatctctaaaggtcactaccaccaattcttcccattcctgtaatgcatgttactcttcccatcaagaagccgagtctatatctctacccttgattctcagctggccttgagacttgctttgaccaacagactgcagtggaaggaaggttctggaacttttgagcccagaccttaggaggcactgtaacacccatttttactcaagagggagcccgctgccatatcaagagtccaggctatctgtatggagaaaggtcacacggaactgaactgaagtctcagatacatgagtgaggccaaccaagcatgtggaataaagatgatgggttcttgttgagtccttcctgaattccctacagaatcattaacaataaaatgctaagttggggtggtttgtcatgcagcaatagataatggaggcaatggatttacacacctatgcacacacattccacctcatgcatatcccagctccttcgaacaccacaatttcacctgagaatgacgcaatttttatatctggatgaagctggggccactgtaagaatttacttaatggaaaaggtaaacacataaatcctaagcagtcactacagtcagaagctggaatacatgatttctacagtctaagaccttccacccatttccaggagagcccggccagcttctgcagggcccaagattagtctcactgagttttagaaatgcagtgctttccccaacactttcaggacggttctcttttttcaaatccttggctgcctgaaagtttagacctaaatgtagtgctcaattgtaatgaattcatcctaggtttttggtataatttcttccttctaaatgttttttgtttctccttttagctttaagtatcgttcaacaattttcatggcatccccgacatgtgtgaggtgctgcacatatggtaataagtaaggcaggtctctgcaataatgggacccacccattcatacattcaaacattgagcccctgctacacatcaggcaatatgcctgatgtagagagacagcagctgagcaaaacaaagtcgtaccctcagggaactgatattctagtgagggaggcaggaagtaggcacattgaatttataaatatgcagtgccaagtgttaagaagaaagaggctgaaaagggaggaaacacaaaatggtgcggtgaagagggtgcaagccatgcctgtcaagggacaatgacgaggggtgagatggctgccactacaggcctgttaactgctacgtgtgcccctagaatgggagagccgggtgttcctgagcagggtgcaggctgtgaggctgcagaagaggcttcacagagaaggtgacttttgagtacagttgtgagagaggatatttgccagataggcaaaaacaggcatacctggtggagaggaccacaccactacaagtctttaaaaacaacactgctattctgggagctgcaggtagttcatcctaattgggaaacttttttttttttgggcaggggggatggagttttactcttgttgcccaggctggagtgcagtggcttgatcttggctcactgcaacctccacctccccagttcaggcaattctcctgcctcagcctcctgagtagctgggattacaggcacatgccaccacacctgactaattttgtatttttttagtacagatggggtttcgccatgttggtcaggctggtctcgaactcctgacctcaggtgatccacctgcctcggcctcccaaagtactggaattacaggcgtgagccaccacgcccggccaggcaactttgaaatgagagaaatgaggcgagaaaggtggcagcggcgtcacaggggtttttctgggccgtggtgcagtttggactgtatcccttgcacactggggggacactgaagggtcttataaaggaaaatgacatgatgggacctgtgtttggaaaaaagcagctctggccaccttctagggaaggaggctggggagcttcttccgatcttctggaaacaggcaggttgtagaagacaaaggttcatttcttacctgttcgcccaagatacagaagagaggttgatgggcagagactatctgcaaaggccgatgacaaagtctgctgcttctctccggtcaggaggtcaataacataccagatgtcctgctttttacctgaaaggacacaaaaacacatcgtcgtttacaccatatggaaaaaagtatcgctgccaaactagcagccaagatgctctgtattgagagagatagacctgaatttcttaggatgtcatttctaaggtgatgatataaatggtaatgcagagataataaaacttcttaggtccataggtcttataataatttaataacctaaacatggtatacaaattcctccaaacccaataacataattatagtttcaaaaagttccccaaactttcaagttagattttattgctttgatgagtggctttaaatatgaaaagtcttgcctgtgaagggcaatccttttcccgtggactgggatctatagaaatacagaaatgtgcccaggggttcatctccctaataaccatcattcacatttctcaacctccctaataaccagccaccatgtgagaaggatccacagttactgtttatgactataattaactagtacctgggactggtcagtggagttggttgcaacctgatgctaaggatgtcaaagttgtctcggcctctgttcccagccagtaagtaattccctggcctcgggccataccccctaatcttggtcagctgattatgacaggcagacagcacagtaaataacactatatattaagaaaacccaaagcatatgtatcaatggtatatacccaacagcatcctaggaatggagagtctgtagcaagggcctccaatgtgaaggtcaacacagtcactgtgatgcgtgtatttccattttgtaaagcatgatctctggtggtcatttttatcttcctaacttattggaaaagtctcctgttttggagactcttagaagaagaatattgagatgctggagaaggtcacagagcctttgaaatttttttttttttttttttgagacagagtcttgctctgtcgcccaaggaggagtacagaggtgtggtcacggctcactgcagcctcaaactcctggactcaagtcatccttttgcctcagcctccccatagttgagactacaggcatgtgccactatgcctggctctttttttattttttttgggatggagtctcgctctgccgcccaggctggagtgcagtggagtgatctcggctcactgcaacctccacctcccaggttcaagcgattctcctgcctcagcctcctgagtagctgggactacaggtgcgtgccaccacacccagcaaatttttttttttttttttttttagtagagacagggtttcaccgtgttagtcaggatggtctccatctcctgacttcgtgatccacccaactcggcctcccaaagtgctgggattacaggtgtgagccaccatgcccggccacctggctaatttttatttattttttattttttttgagacggagtctcgctctgtcgcccaggctggagtgcagtggtgcaatctcagctcactgcaacctccgcctccagggttcaagcgatactgctgcctcagcctcctgagtagctgggactacaagcatgtgctaccacgcttggcttatttttcgtatttttagtagagatggggtttcactgtgttagccaggatggtctcgatctcctgacctcgtgatctgcccgcctcagcctcccaaagtgttgggattacaggcgtgagccactgcacctggcctacacctggctgattttttaaaaatgtttcttctgtagagacggggtctcactatgttgaccaggctagtttcaaactcctggcctcaagcaaacctcctgcctcaccctcccaaggtactgggattacagttgtgagccactgcacctggcctgtaatttgctaatgctatacctctaaagttctaacagatgttgcatacatgcctgctccacatgtgtgcaacttacccatggatcgcaactctgttctcactgacaaaatcataatatgaatatgatctgaaggtagaggagaacagagctaggaccacgaaccttttccatctagcatgacatagctggttacttcaagaaccactagagtttacataactcagttattactttaatgggtagattgggcaactaccatgctcttaaatatgtttaatgaactcgcctaagaggccacagcacaaagatgataagaagacaatatcctaagcagactataagtgatgaattgctggcaaaagctggaagaccagataggacacagtgacatggatggtcagaagattatcagatgttcccaggtcacggcccacagagagaaaaatctgtgccgatcgtttcctccaaattcctaggctgggagttcctcattctgaaggtgtggaaggaagcaagagtctcagtgtcctgagcaaaaccttaaaagtctggcctgcacttgagacccagaaatacacataaagctcctcgaggcatgaataggcaataagcactttcagttcctcaaaaagaaagctgctgtataaatacgggctattattgctactatgatttcaagataaatacagctctcctttgtgttgcaaatgcttttttattgacattttggcagcaacatagtaaaagaaaagcaggtgatctgatgctttgaaagctgtgaccccataggtatgaaggcagtttatctaggcaagctattaagtgctgttctatcaaacattctgatagcaggaaatactaagaaagcgctataattaacaggcagagcctggctttccttccttggcttagatgattgtactcactttaaatttcatccatttgccactgggtatgttgcaatcttggaatctcaggactaagtcaacacagcaactaaaagcttgttaaatgagtaaccatattaatgatgtcaattcttctcccaagttgggggagccctttcttaattggtcagctgatcctggggagaacagcacctgaagcacaacccaggaaagaaagggttggcaaggcggtgactgcgccctctctctccgcatgccactttcccagattccgggacttacatcaaagagacacaagtttctggagacaggaactcttacccatgtagaggattccatctgaacttcggcatggggatgcctgcaccaattctgggatggtaaaaggaagtttctttaaaaaaaaaaaaaaagaaaaaaaaaagttaaccaagtcttgtgcaattattacaattttaccaggcagtttgtttctattacctaattctgctaaaaagagagaagcactttgcagatgagagttttcctaactgaatacaaaggagaagggggcaccctatgcttccacatctactgtgtttttattttcatttttttgagacagggtctcattctgtcgcccaggctggagtgcagtggcaccatcttggctcactgcaacctctgcctcctgggttcaagtgattctctcacctcagcctcccaagtagctgggattacaggcatgttgccactacacccagctaattttccacatctattttgacaagctcccaggtccctgagctctgtaaacatccactcctttacttgacaccatgtgcagaggcccctcaaggtctcctgtccagggtgcttcccaggggtgacacaaaccttttctgaaaagatttacacaaatatggagagttatatattctttgaaatgctaagaaagaattgtcctggcttggaatacagagccagagctggctagactgagtaaaatgacagtgctttgtagagccccatgggagggagccaggacattgatgctgaagggatgcaaccttggtgccaagctcaagcttcgagggaaaggagaagtcgccattacaggggcaacacaagagtttgaggtggaaaagagttttgatgttttcttcagtaaataattcactattgaaaaacaagaaaaattgagacttttggttttaaagaggaagttaagataggtgccaggaaaagaaactcaaaggaatccaaatgtttcaactgcatttcatcataaaactgattcttctgagtctacagctgacatctgacgagctcttttggttaatgcttgtttcagtatactttatttttagaacattctgtgtttttgaaattgttctatagatacctgcttttatagaaatgcctctactgcatggtcacctttttctccaagaaagaaaagatttctctctagctttaataagcagagctttgcatactaaataacttggattttcccatcatcccaacattcaaaccaagcctcagaggaggaaaaatgcttcagagaggctgcaatgactgggttttgccatgtgtttctgagaatcagaaaggcactgcagatcttctagtcttctggagtcctgtggtctctgctgagcactgccactggtgccctgattcaaggcccaagcttgggaaacattgtttctggagctgctaaaccacaacccagaaaggagcacaagggagtgatgaagggcatcctctttttttttttttttgagacggagtctcactctcacccaggctgaagtgcagtggcgtgatctcggctcactgcaagctccgcctcccgggttgatgccattctcctgcctcagcctcccaagtagctgggactacaggcgcccgccactgcgcctggctaattttttgtattttttagtagagacggggtttcaccgtgttagccaggatggtctcgatctcctgaccttgtgatccgcccgcctcggcctcccaaagtgctgggattacaggcccggctgggcatcctctttaagaaccaactccaacactagaagactcagccctggacatattccttcacttctccaggctgtttccacacctctaaaacggggatatcacccacagggctgctgagagattccaatgagataacttatacaactcactcaccccagtttctggcaaacaaattgcttaagaaatggggactacagagctgtggagagaaaccaacggagagcagtgttgaaggtgaaatacacacagctctatacaaacttgccctcctcccctctgttttggtcacaggcattcacaaaataattttaaaacacccaagttaaagtccacaatccacttacagcctagatcagtggttctcatccttggttgcccatgagaattacttggaagctttaaaaacttcctactgatgcataatacgcaaacagaaaagcactcatcatcacacagctcagtcaagtttcacaaagtgaacatacccacgtaaccggcatccaggtgaagaaacagaagcccccctcctctcttgcccccctttctagccataactctccaggggtaactattatcctaacttcaaaacagcagagactcgtttttcctgtttttggctttacataagtgaatggcagcgtgtggccttttttgtctgtcatgttttgctcaacatcacgcttgtgagtcatccgcggcgtgtgtcgtcatagactgttggtcctcatcaccgtgcatgccgcttccagagtttatttttccactccactgtggatgttatttggccaccctctgcttattataaatggtgctgctgtacatttgggcacatgtccattggtgaacaaaagtgcatttcttcttttttttttttttgagatggagtctcgctctgttgcccaggctggagtgtagtggcgtgatctcagctcactgcaagctccacctcccgggttcacgccattttcctgcctcagcctcccaagtagctgggactataggcgcccgccaccgcacctggctaattttttgtatttttagtagagacggggtttcaccatggtctcgatctcctgacctcgtgatccgcccaccttggcctcccaaagtgctgggattacaggcatgagccaccgcacccagccacaaatgtgcatttctgttgggtctgtaacctaggagggcattactgggtcctaaggactttagcacttactgccaacagttttccaaatcacttgtgccaccctgcacttccgccagcagtaggtgagagtcctggttgctccacatcaccaacatgttttctttttctactttccttgttttggccattctggtgagtagcagtatggcactgtggctttaatttgcatttccaaatgactaataaaatggaacatcttttcatatgtttatgaccatttggatattctcttctgttattcttccattgggctgtctttttttaacgtaccataggatttcttcatatattctgaatatgaacttttgttggatgtgtatactacaaatactttgtggcctcttaatgaggaaaagttcttaattttaatataatcaatatattgattttttcctaaatttatagtgttctttaatatcctacttaataaatctctacttactctaagatcatgaagatggttccattactttttttcttaaagctttattattttgcatttcacatttagatgtgtgatctatctggaactgattttatatgtgttgtaggggggtaggagtcaatacttttattcctatatggatatcccaattgacctacaccacttattgcaaaaacactgtaagctgggtggtggtggctcacgtctgtaatcccagcactttgggaggctgaggtgggtggatcgcttgagcccagaagttggagaccagcctaggcaatatgatgaaaccccatttctaccaaaaatacaaaaaattagctgggcgtggagatgtacacctgtggtcccagctactcaggaggctgaggtgggaggctggcttgagcctgtgagacggaggttgtagtgagccaagattgtgccactgcattccaacctgggtgacaaagtgagaccctgtctcaaaagaaaagagaaaagacaagacaggacactgcagtgtcacctttgtcacatatcagatgaccatatgtgtgggcctgtttctaaattctcttatctggggagcttttaaaaagtcctgatgacttagatcaattaaatcgggaccttctgggattgggccctatgttctaggtcctaatgctgttttttcgaattccaggttattacaatgtataattaaggctgaaaaccactggtttagattctcaaatggaaatgagggtagaatatcacatgactcccttaaggagtcatcggaaggtggggcaggtggagacagcatttcaaactatatccctccctcctaaggtgagggtcaccagttagagcaaaccctgttcttaacattatatcctccagtgtatgggctgggccatgagaacctgctggtctgcatccgtgtttctgaactctggcaccacatttaaaagctcatttaggaagctctctgaaaagactgatgcccaggctcctctctagaccacctgaatcagaatccccaggggttgtttttaaaagctccaggtgggagacacagtaagacactgtgcagacacacttaaggaccgctggtctagaacccctggagtacaaaaagcagctaaatatactcaccgtcaggccttcattattcttgcttccaagcgtatacaggctgccatcattaggatctgggagaaaggcaggcctagagattaaataataaatatcaaagataaattacagcccagggcatggaacaacataccaaagccacgcaaacccatgatggaggaatagagagtggagggtggttgtgtgtaggtgtataagtgagtatataagacaattccacccactactctctctcacttcaaccacagataaataaaatacccctatggtggtatacactatccttgagtggagaaaagcggcctgaaaggaaaaatcatacaaaaccatagaagacaaattatcatttggtcaaagcactctggatgaaggcaaaatatgtgaaaaggacccagtaagtccacttttcaatttctacatcaattgtatatagaactccagccattaatatttgataggatggcatggtacataaacaggtagaacaaatctgcttttagttttcaagagatattttttgtttaactggaggcaataaaagcagactctaacagcttgacatcagagagaacccgccaaggggacagatcaaggtccctccgtcagtagcttcccttgaagcagatgtgaagtggtcttttgtcaagttaatctgctaaagactaaactataactacagtccctcagaaacccttggctgaatcgttccttaggttgtgccatcatttaaggctcttaccagtgctatccagcttttaccccaacacacactctgtagtagcaggtcacattcaccttttttctccatgatatgacacagcaaagaggaagaggtccagtccccctgaggactttggaagtttaagttcaaagctcaacttgagtttcatctcaaataagcctttttaaaaccactacccttctccctcaggaaactgaccacctcctcctcaacacaagctttcatcatagcacctgtaagactttatatgtcactcactgttattcctcaaacttacacatatatgcactcccagcaactggcctcataaacactgattgaatgaagaagactgaattaaagggaagtactgagcgaatcagaaaacttactcttccacatgtgttgggacctgcaggactggatctgtgcaaaagaacaacaaagccatcatcagaaacatcccaaaatgtcaagattcccagaggcttcccaggaccaggccaagttgtaccggtaataactttctccctcctgttaacctacatgggctagtgcacgtgaaggttatatgcatttttgtatcaccgtgcatatcttttagaaaacatatccacaatgatgcaaatgtaagctcttggatagttactgaggctggatagagaactgagaccagaacagaactgctttcaagaaacttgcatataacttgggggatggatgcagaacgaagaaccagtcaccacacaccgtggacaaggggtcagagcatcactatctgacacctcaaagacttctaaaaccttaatcattaccttgtccgatgcctggagtagctctacatattcccattaggaaaagtaaaatgggtttaagaactaactttgattggccagtaaatggacacacctctttggagcggcaattctagagcctccaagtgttcattccctttggcccccccattgcatttttataaaatctaatttaaagacaatataaactatagaaaatggtttttgtacaaagatgtgtacgtagcagcattacaaatgacctacccaataatatggttaagttatagaatgtccacttggcaaaaaattaaggcttctaagagggctaataaaattttaagacatatacaaacctatgctattatgttcaggagaaaagataacattgtacatagagtattaatgcaactatggggaaaggcttcaatgtacctaattagatggaaagatcaaaaatgctaattgtaagttatccttgttggaaatgcaactccccccaaccttttctatatcttaaaatttctgcaagagcaggcattactttttaaattgagaacacgtttttttctctaagtcaattttacatttgcagcaattaatggcagaattcttccctccctagattttcctgggcacaaagcaagaggaagctcctgattccaggggcagatggtggtggcagtgagagagcatgaacactggcacagcagcactgtgtagtgacagatccaaaagtccgcaggcaggagactcacagcgatgaggtatttccagcaaccaaaaccccacagccatgctatacacaacttaatctctggggggcaagaacagcaagtattcttacatgattttgtatgcagaattccagactctgtaggctctgcttatggtgacagacggctgtccaatccatccaattattggatgaaggaaaatcttttaagccttatcatatgttgactttgcttaaaagcccagctcctatacaaaggcatatggtgttcacaacaacagaggtgtacacacaccatatgcggtctgtgggcagcaaacaaacaactcactaaaccaaaaacactctaggaaacaggaagaactttcagtcagtaagcacatgtttatctttcccattaatcacctctcggtacactctcacaaacagactgatgcaagagacaggaaataaaggcacaccacactcatcctactgaaacaagctagtcaaggtgcaataacccagttattttaacaccggcctgaaggcatgcaagccaagaagagcaagaatatcatattccgaagaaaacacagcagtaaaatggcatcttttttgtttgtttcagccacttaaaggtatcacagataaacacagattaagaggacatggccaaattccaggaattcaccagaaacaagacatgcagaccaacatgatttaaattcctgttcataacctgatctttgctgtacagtgtttgctcagtcacacagactcgtcttcagatgcagattttcctggttttctatagcttatccactggtcacctgacactgaggcctcaggtcccaagatatgccctgtatcaggaaggttccagttaagattcaggacattggcaggagacaggggaagattcccgggacaactacattggtgtttaagaactgtgattttttttttctaggcttaggagaagataaactccagtaggagggccttatggttatcttagcatttcccatccactcagtaaaataagcacctggaataagcctcttcaaagctgcagcccaggtaaagacacaattattaagacagttctgacagaggcagacacactgctgcttggcttctgaaatgtaacaatgacctaattctgtaaatgtttttctttaagaatcatctgaattcaagatttgctttaaaatactacagaaaataattatacggggggcggggaggacagataaaacaagaagtggcaggctgttgataacagttaaagatgagacacgggaacactggagtgttattttactactctctgtacatatggttaaattttttcatattaaaaaaggttaaagagaaaattatctttggaaagtcagcaaaaataaaaagagcattatctgaaaatgtgcactaaaagagtaacatgaaaaagtggttttgatttaataatgagaactgatatcaggtaagattcttgctttaaaaaaaaaagttttcagccatgtgaaaagaaacactgtcctacctgtagggatgtaaacaaatactgctgtaaaataagccactatctatatggggcccgataagaataaaagccaatgtcaccaagttgttttactttcagaaaaaaaaagttgtgggggagttacttcacaaatataaaaagtggctgttatgtaaggtaaaggtaaggttatctggtaaaggtagagggaaaatatagctgaaatcaaggtttggtctcccaggattaacacgggaaagaaacaaacctgctcactgatcccctgggagcagccactggcctcaactccactccccggcccccatcgtgtgtccagctgaggcctggaatggcacaagttttacacctgcaggaactgacatcctgggtgaggtcacaagatgctcattgctaggctaatctaaatcacttctttaagctcaaataacaaaacagacgtccacatctttcctttgtccaagttcataagggtaaagttttaaacatttctgtccccaaaagcagtgaatttttgtccccactccctcctccacacagggaggaacattgccagcttctcccttcagcctttcttctcactcagagagcacatgcctctctataacttccaccctaaccacagtggggttctaggctcccctctcccgggtcctttctctggatcaactggacacgcccactacttcccaccaacgcctcagcctctgcttgcccaagtcacgccctctgtcttttgcctgagactggcttctactcctgactaccgtattttattaacagtaccaccattctcctagaagaaagccatgactcaaacgacactgttgatgtctatttctccctaacacatgctatcagttgccaaactctgtggtctgtttcgatgccaaccataattctgtgtcctgttcccattcccttcaacaccataggaaccctttgtctctcaagccttccctcctctcttaatctgtgtggactttggaatcagacaaaccaaggcataaatcctggctctgccaatcaccagctgagtgaccttggcaaagttacttaagctcgtggagcctcaatttcctcatcagtaaggaaaaaaaaaatagagataacatcaacctcatggggcatctctatgtggattaaatgtttgtcaagactataagtcaatgccttgacactgagaagagtgatccttttaaaggcataaatcagattaagcttctctgtgactcaaaatcctttggtggttccccatctcactcagtgaaggccagtgtttacacagtggttcataaatcccaagcagtccctccctttcaacctgtcaccctttaacaatctcccactatttcccacacactccattccagccatgccggcctccaagtattcaacaagcactgccaggcctgcccatgcctcaggacctttgcactggctgttcctctgcctaggtctttgatcaactgttgccacctcagagcggtcttccatgatcacctcctactgcccaggatttccaacccttcttccctgcttaatttttctccatgtcacttaccacctctgtagttctgtatattttattgcttacttaatgcccaactctggccacggagggttgggatttattttttgttgtctgcatcttcccaaggatctaaaacaatacctgacacacaggtggtaaccaacgtatttgctgaatggagtaattaagtgtcatttcctgtcttagtctgtttgtgttcctataaaggaatacctgaggctgggtaatttataaagaaaagaggtttatttggctcacgtttctgcaggctgtacaagaagcatggcattagcatttgcctctgatgagggcttctggctgcttccactagtggcagaaggcaaaggggaaccggagtgtacagagctcacagggcgagagaagcagcgagaggggagaaggtgccaggctctttttaagaaccatctctcacaggaattaatagggtgaggattcactcactacaatgaggacagcgccaagccattcatgagggatccacccccaagacccaaacacttcccattaggctccacctccatcactgggaatcaaatttcaacatgaggtttggagggtcaaatattcaaactagcgcagtttctttcctacttccactcttggccagcctggaaatccattgttgatcacttttaataatccagcagataagctctactcaccctgaacccaggatctgcatagcagtccctgttcctccacccagccttctgagcacagctgtagaaaacactgcgatcattagtggagataccatgatacgtggtatctccatggtgtggccagctaggcccctgccactaggagatcctggctggcttctgttctcacccctgtagctgatatttcaaactactccttgcctcaaggtccctgtctctccacaaatgactctgccttctgtgtcataggggatattaagggagactgagtgagcttgctgaaacttcctaccctttgtcttctacatttgcccagctccacccttcccttcacatctctataaagggacaatgcttttgtcttcacactcatagatttttcacactcacatctagatcctgtctccaaggatcttcaactcctcctttgcctataaacacaaaaacctcttggctctgcctgctcttctgcacactctccttttcctccaaagtgcaaccattttaagtttacagttcaatcaatcttgaaaaacacacacccatgtaactatcttcaccatcaagatacagaacatttccatcaccctaaaacattttttcacatccctttggattcagtatttccaaatcttgctccagataagtaccagttcattttgtttgttctaaaatttcacaaatgaccacgtcatagatactcatttgtgcctggcctctttatctcacataatgtcttggaaattcatccatattgttgtatgtatcatagttcgctcttttttattaccaaatagtattctactataagaatttaccacaatctgtttacctatttacctgctgagggacatttgagttgtttttattttcttggctggtgtgaataaagcttctgtgaacatttgtgtacgagtgtttatttggacctattttcatttctttttttttcttttctttcctttttttttttttttttttttttttttgagatggagtctcgctctgtcgcccaggctggagtgcagtggcacaatctcagcaacctgcaacctccacctcctgagttcaagtgactctcctgcctcagcctaccgagtagctgggactacaggcgtgtgccaccacacccagctaatttttgtatttgtagtagagatggggtttcacctattggtcaggctggtcttgaattcctgacctcgtgattcacccgccgtggcctcccaaagtgctgggattataggtgtgtgcccagcctattttcatttcttaaaacaaggagggggactggctgcatcatattgtttacctctgacaaaaaattgacaaacagtttgcaaaactggtagtactgttttatatttccaccagcaatgtattagagattcctatggaatttttagaatgttgattcctaggttcttcccccaggaagctggctttgtaggtagagacaaggaatttgcctttataacccaagctgggtgattgagccatgtggggaaactacactgctccgaatcctctgttccaccttcctgccttcttaccttcctccactcactgccctccggcccctaccctcagaataagatcagaactgccactgtcaagttcccgtgatcaaaaccaacacttgcaaatcctccgcatggcatctgaggatgttctcccttggactcctgacccagtcccacttgcaactgctatgggtgtctcagcccaaggccatacccccaggacctgctcctcagttcacattccccagattggctagtgggtcccacttccacccagtcacacaacctagaaactcaggaagtccccaaaccagtcccttttaagtgtacctctagcagtgactgtaaatgttttgggttggcccttttgaaaagtatttaagggagagggacagggattaccccgcattgataattattgaagctgggtgctgggtacatggtttcatgatactactcttcttactttggggtatgtataaagtttttataaaatgaaaagttaaaaaaaaagctaaaaacagaagctatttaaggcaaacatctgcaataggttggagagaatggcctgttcctcctgctctcacctgtggcataattctgaagagcctgctcttccagttgcacagggcacagagagactgaagggaaacccaagttaagagcatgaaggaccctgtcaggaccatcccaggcttccctaaatgcagggctggcaaaattcgtgagggcctggggaaaacatggggtgataagtcagctgaacagaaaaatgtctttgatgcaatcaaccaaaatttaaataattgtttcaaaccagacttcgagattgacggcctctctctggaggtagctctgggcagacttccttccatgtaggaagaagtaagatccctttgattacagaagccacaagaacaggttgctcacttaactggagctcaaggagccttgcaagatccttctcttatctttcccagatgagcacggatatttctggaacaccctgcttttgcttttccgttggactctagatgacctctggctttactgccctcctccaccttgttctttctgaccccatctgaccacccttctgacccccataacgcagcaatggaaatcagctctctcttctgcacaactaagatattaccacacagttagaaagtccccaaaccagtcccttctaagtgtaaccctagcagtgattttaaatgttctgggttggtattcaaaataccttttgaaaggtatttaaggacccaaagagcagagatgaagtctcaaatgctttatagtctgtgtaatcctctacacacatgcacccccattccccgccgaggaggaagaggactgacaaccctgctactagtaactttctgttgagatgcgccaaacacatctcagaaacaactgtcagatatctgcttcagctgggttctctgttaagtgccatgcaggataaagaagggagcttatggtttgagttacgaagctaatacacatgaaccacacataacgaactgctagaacatggggcatgcaccacaggctttcctaggtggggaccggaatactcggagcagaaaaccctcataaaggcagccggccccaagcacagggatgacaagacaacatgagtgaaaaaatgtcactgtgttcacgggacagaggacgcaggctcagtaagtgtgacatgttcctcctgaggaacaacacaaatgaagctggactgcaggcagtgacaccatggggaagaaagccttgaaaactttgtgatgtggaatgttggtcactagagtccaactggaagcctctgagaaaaagaggaatgtgggccgggcgcagtggctcacgcctgtaatcccagcactttgggaggccaaggtgggtggatcatgaggtcaggagatcgaaaccatcctggctaacatggtgaaaccttctctctactaaaaatacaaaaaattagccgggcatggtggcaggcacgtgtagtcccagctactcaggaggctgaggcaggagaatggcgtgaacctgggaggcagagcttgcagtgagccgagatcgtgccactgcaccccagcctgggcaaaagagtgagaatccatctcaaaaaaaaaaaaaaaaaaaaaaaaaaagaggaacgtgacacagggtgagcatcccaaatccgaaaatccaaaatctgaaatgttccaaaatctgaagcctgagcgccaacgtgatgtgcaaaggaaatgctcactggaacattttgggtttcagattttcagatttgagatgttcaactggtaaatataatgcaaatattccaaacctaaaaaaatccaaaatcagaaacacttcaggtcccaagcatttcgggtaagggatattcaacctgtacaagtcctctgaaggcaagttagacaggcgggcattgaggcacaaaatgaagggaaaaagggagaaggaatcacaaaggtgctgcaacagatagacccgagccggggtggaggggagtcagaaacagacaggagggaaaagagtgtcagcaaaactgagccctgtctagataaatgcagtgggagaaaggaacgatttaaaggtgacatggagattttaaccctggctgacaggtaacagtgaaactagaaaggcatagtctgaatgaggtaaacaactgctattttctcaagaatgtgcttaaggttctaatactgttttcttattaaaaaaaaaaattactggcagaaacaaagccattcacccttccttaactcaaaccttcagtctcccaaatatgtttcatacattcgagtggcccaattagggagtacttctccccagtggcagctcattccttccctccagagaaaaagcacttcattaacctaagccataaactcccattaaagctgttaggtccaaattttaagacagaaagtctcaaacattctttacagttcagctttcatgaggaaagcatttttttttaaagacatctaatcaaaagctcctcaatttctaatctcagcagaactggaaaaggatgtaataagttttctttggaggtaacctccataagtcacgaagtgtcacacttggcaaagacgatcacatagaaatgaccaagtaatccggaaaactgcccatactaaaagcagctgaagtctactgcgttctcatttatctctactttggcagaagtaactcaggccaaaaaacacactgaacgttataatcaatcatgaaggcactgaagacaattcaacactacagcctgtgtccaaatgcctctcaggatgtcataacttcacagaattcattcctgagtgatggagtgccatcaaaccagacactcaaaagtgaacaaagggacaggtaactaagtcacagacaaaataaggcactttatccatgtacttcaacaatcacaaccatattccaacacacaccaaccaatgctgcaaagacgacccatcggagctgagatccacgctactacgtgtgtggcagctgctaagaggagccatccgaaatgagaaatgcattactttgaagcaagtcccaaaaataagggaagaaagtgagtgggggtgcaggtgaacaaggctagatacaaaccagtccctgttgaagctgagtgatgagtacatgggggttctttacataatacttctacatttggatatgttttaaaccgtctatgtttaaaagtaaaatacaaaaaaagaaagaaccaacacatttccaagatgctcaaaagtaaaaacaggtttctctcacagcccctttcataaaacttaattttcaatccttcacaacaatgaagaggaaataaacacctttcttatacttaagcagtgagggtaaaaaggtagatgatgcatattgtaagcctagaaaagtccttgagagaaaacaggttagatctattaacaaaacatcatcacttttcacaatttccccttctcatgtttccattgcacttctgaagacagatctccaactcttccagagtcccacacactgcctaaagcaggacagaaaaaccaactgccaaaggccatgcaaaactcaagatcagaaaccagaaccggaaactgtcatgactatgatacaagcaacaaatgattcatcctgagaaggcagtcaagtcccatttgtttctcaggactcccaaaagacgtccaggcagaagagttctgggacccgagtcagcatcaagtgccttggacatttactgagcatcctggctgcccagagccccagtaaggaggtagaaatccactaggaagcaaatgagaacaaaaatttacaacacaagccagaagtgccacaacagagggttcagaaaagcacctccagaacccagagaaaaaatgggctcaccctgcttgagaagccagggaggtaaatggggtcttcacagatgaacaggagcttgtctaacattgcaggctgctggtagagagggagcatgagcaaaggccagaggtctccaaggcctggtaaggagttacatggctgcaagtagggcacctgctgggcaggggagggagcccagggagttggggcgggggggcggcggtgagagaccacgaatggccttgcacatgcactaaggagcttagacttgaccctgtggagcagcacttctcaaactagcagtggtgaagggccagttgttgaaacggccaacccatcatggatgatgctcacgctccctatttatcctttcctcatcattcacaggtaacacaccacacacactgatgcaggcacaacgccaccactatagacaacaccaagagcatttcagcaggcaggggtacagctaggtccaattggtctttttgggggtgtatctgagggcagtgtgatgagtgaacgagagggctaaggtgcggggggcatggatggtggtcaggaggctgctgcattcacctaggaaataagtgccaagagcctggctaaggcaccagcaatggggccagagaggagtcaggtttgcagggtccttcccagtctgcatgacagggcttggtgaccactgggcatcaagggggaagtagcacagcatcattctattttctctagtttctatactgcttggccgtgattctgtcagcacagggaggaactgtggcaagaggcacatgtttagaaagagacactcacgtgagaataaaattgtcttcaaatttcaaataactttgttctgactcttccctcctaagaaatctccagtattatgtcctgttttgttcacctgctgtatactcagaacctggagtagtatctggatagctttatcatttatctaaatgtccactcaagggacatctccggagtctgggcccagctggctaggagagtagtcatattgcatatttagcagattttcatgattagtaaagaatggttctaatttgacccagctcttcatgcctactattattggaaaggagacagaaaagaatagagcagggttgctatagaataacctgtaatttgatggggatttgagtgttaaatatcagcattaactagtattttaaggtgagctcaagaagccctacaccagccctggaaatactaaagaaagtcctctcaactccatcaggccaaagcaagctaatctaaaacaaaacatgatggcaacattctcagtttgcatttcgtctaaaagtacagagatgaaatatattcaactctattcactggtgaggttttagagaaagacagactacagctacaaaatcagtgcttagaaggatggcccctaaagtaaaatgtcacaacccaaatgagttccagaaaacaaaacgcattttctctattacgtataatttgccactatggtgtaagaaaccaccatttctgggaactacaacacgtttggctgaggaacaaaagcacctgccaaaccaccacagaaagcaaaaaaaaaaagtaaataaatacataaaaatgtccagttcattggctcctgaaaaaagtaaacagccgaatggagttgcaggcctctattctgaagaaccccagtttggtgagttaaaggtatgtgtttgcatcagcaagtttattccattcagctctgaatccctctttgagactcagacccaagcttgtatcctctcttgtctggactagtgcagtacacccctgcctggcctcccagtttcttcctggccccatctgttcagtttcaacacagcacttgttgatcttgtaaagtggaggccatgtgccttactctgctcagactactataacaaaataccatagactagagggcttgaacaacagaaatttatttcttatggttctggaagctggaagtctgagattggtttctggtgagggctctcttcttggcttgcagacggccaccttctcaccatgtcctcacatggtggagagagaatgagcgagctctggtctctcccttctcataaggacactcatccatcctaagggccccatcttcatgattatctcccaaaggccccatctcaaagtaccatcacactgagggccagggcttcagcttatgaatggcagtggaaggatgacacaaatattcagtccagaacaacagggcatgttgctccttgcctcaggttcctccaacggctgaggaaaagccaatgtcctcacaccagccactaggccctacaccagtggtatccgtagggagagcacagctccccagggaatgcttgagaaatcgatgaaggtattttctggtggtcacagagactagcggactttacaggcactaagtgtgggggaccagggatgctagcggtcctgtacaaccaaggattgccctgcatctgcatgccactctgatgtcctgccagacattctcatgggccaaaaccctttactaattatccgaggctatagcctgttttacacataagcacaaatgtactttttcataatatacagaattttcttggaacgtaactactgtgtaaggcaggtaaggctgtacttcttttgtttgaaacactaccaagaacagttcaccgtcctggaaatccagttgccgtggctatggtggtaaactatcctgcacttgtctccatctgcatcaacaggcacagcatttgttcctggggggagtgtcagcgtgtgtccgagcatttacatgctatatctatgtgattaaaaaaatactttcctattatttgttttagattaccagttcggtaatatgtttatttctttttgaaactgtgtatacgtagtttactgactataaattttgtttcagtaagcaactttatagtacatgtgaagtaaaggaagcgctgggtccctcctgccctgtatgactggcccatctctctctgagctgatctcctcccgccacatcaactctgtgctcctcctctaccgtgccagggacactcccatcctttctttttttttttttttttaaggacactccacctttgacccgctatgccggctgtctacaagactcccttgcctccttgagctcttgctcaaatgacaccttctccgtggagccctccctgtttaaaactgcagactcccaccccaacctggtactgcccattccatgtccccacttcattttttcttcaaacctctcgtcactactaagtaactgatttcctgttttcccactagaatgaaagctttatgataaaagggtttgcctgttttgttcacttgctgtatcctcaggacctagagtagcatctggatacctttatcatttatctatatttaacaatttagaaaaatgttgaaatcttcagttataaccacaagattaaactgaaaactcagggtatctgcacattaccatctttaatctttgtatagaaatataagtcaaggccactggtatccagggctgaactaaaacatgccagtttattcttagaaaaacagatcatcatgaatactactggaaattattaggctgggcacagtggctcacatctttaatcccagcactttgagaggcagatcacttgaggccaggagtttgagaccaccctggccaacatggtgaaactccatctctactgaaaatacaaaaattagccaggcatagtggcgcatgcctgtaatccaagctactcaagaggctgaggcatgagaatcacttcaacctaagaggcaaaggtttcagtgagccaagatcgcaccattgcactccagcctgggcaacagagggaaactctgtctcaaaaaaagaaaagaaaagaaaagaaattattagaccttaattggatttatctaattcttctttaagtgtcttgtaactcctcctccctagtcagtcactagattctactgattctatttctggcttgcctctcacccttcccatccctcctccctttccaggtctgcttcctgtttctagtcatcccacacacagctgctagagtcatcgaaaagcgagcacctgttgagtcactcacctgttcaatcacattaacagctcccaatttcctgttcagtcagatacaaatgcctaagtgctccatccagtaaggctcaacatccccttgtaatcctccctccctctacctggaaacgctaagctcctgctaaacgggataagctcctgcaccctagacctgctgcctccttcgctcttctccaggcctcactcctgactgaactcaattcattcaccagggtttacctctgacaccccacttcacagagcctcctgccctccaaatggatgtgggctcacagcacattactagtccctctcatgagtggttacaggactcggctgtgttgaagtcctgtgttctcatattttcaccatgggtttagatcatgggcttcttgaggacaaggtctgcctttttcattttggggtcctacagaacaggggtccccaacccccaggttgtggacccatactggtctgtggatgggtctgtggcctgttaggaactgggccacacagcaagaggtgagcagtgagtgagcaagcaaagcttcatctgtatttacagccgctccttgtcactggcattactgcctaagctccacctcctgtcagatcagtggcagcattagattttcataggagtgtgaaccctattgtgtactacgcatgcaagtgtagtgtggcatgtttcttatgagaatctaatgcctgatgatctgtcactgtttcccatcacgcccagatgggactgtctagttgcaggaaaagaagctcagggctcctactgattctacattatggtgagttgtataattatttcattctacattacaatgtagtaataattatagaaataaagtgcacaataaatgtaatgcacttgagtcatcccaaaacattccctgcccctgctcccccggtccatggaaaaacttccacgaaactggtccctgatgcaaaaaaggttgggcactgctgctatacagtatctctcacattctaggttctctaaatacacattcaattgagttaaaaagaggcaaattctttcagctctaagttagaagagaaaacaggttaattcttatgtttgactaagtaacggagaggacacagttttgttgcatacagatgacattacttgcagaaatgaagacttggaaaaaaccaacttaaagcattatgtgcagggaaaagcaaagcagaatgaagtggctcagggtgaagatgccctgcctgggaacaatgaaactgaaagacatgccctaacattccacagccaaagtgtttctctcaattcttgtgtgatttgttgattttcatctctggacaaaataggaaatcctgaagtttgaaggactctgtttcattttaaaaacattaaaaggcttaaatgtgatggagatacagtacagatgatgttcttggaacctgtaataaaacactctacagtcttcctgtggccacacactcctgagagagctggtctttgggctgcttaaagttcctgctgatccaagcagggcccatgcaggtggggcaggatggcttgtggtaacccagctgccatcatctatggatggtaacgaggtttgctgctgaattcacaagacaatgtgtgaccttctgacatatgccaatatttttccatctagcatactgttttggaacactttattaaggaaggaaaaacattggctgtgctcgtgaaagtaatgagtcacagagtagtgacgaaagagaacgatgctgttcagacccgaacctcgggccaaatgagatttattactagacagattaaataatatagatgactctgaaagtcccaaatcctgggatttgcatggctttatctggaaagattactttggaaatcaaatacaatttcccagctgtagggcttgactctgctagttaccaccaggaagatcagatcataacatggacgcatggtatgttaagtaagaaagaagctcagtctttattcccctcaccataacaacccaataaagtggttaacttggatgaatgtcaaatcttacagccctctattatttcagcctctataaaaacaaatgagtaatttgaggtgttgagaagataccttcttgtaattatgattacaagattctaatcatgagaacaaatttagtgcagcatgtcttcataaagaccaactagctagagctattaatagaaaagcctagagccattttaacatgaagtctaaacagaagcaaaaaagaagataaaacgtgcttctttaactgatgcacttagtggataaccacagcaaagctataaacgtcctttgagcagaatgccttttcctctcttgatcccattcttctttatttcttatttattttattagataatgagtaatgttttctctttctccagaatatgtttctgtggaaccagttaagcaaatgtccatgtcgcccaaggaccaaatccaaattaccttcttttaaagtccatttgattgagcctgtcctcttgctgacagcatgcaaacttccatccagcgttgacacaaacaacaaggtttcaggaagcgtcactgtgctggtacttccaaaaatctgcaacgagatgtagaagactcttaatgttgatatgattcttcaccttgggcatgtacaatcacagaccccccactcccaaggttatcctactaaaaccctccattttacagatgaagaaatggaaggtggagagcctaaattcccactcagtcaggactagaacccaggtcacctcactctaagcagtgatcctgcctgcagacaggcaggctcatgacctaacattacaaggacaagaattctgaaataatccatgggcaacctccactgaaacagaggggcaaagtatgctcagctttctgacttccttctcttgggcctattctattctctaaaacctgggcatctcataagacgttatgataaaaaagaatgccaatacccacgcatacacacattcatgaaattttaaaaagcaaagaattaggggaaaatgcttaaagcaaaataggaaaaacagctttcattatacaaagaatttataaaataaaacactaagattccagtaaagatatgttataaaagtaaatgaataaaaagcataaccccaaactggtcctcacttagaataaaaataaaatttaaattaaaatgtaccttttttctcaacaaacttaaaacaaaacaaaaaaaattttaaaagaaataaccaaaggctgtgacatttcccatccattgctagtagcactgaaaattactagtatcatctttctggaaaatataaaagtgctcttagtttttgatcctgtaattccacttctatactctaaagaaataactccagaaatggaaaaagttctgtgcacaatgatactcatgacgtcccatttataaacacaaaaactggaaagaaccaaacttccaataatatctaaatggctaagataaataaagacatatgttcagtgaaataattatcattaaaataacacttggaaaaatctacaatatagaaaaatgcttatatacattatcaattaaatatagaatccaagatttgatatccactgtggttacaattatactggacagatttttttttttgtctgcctgtcttctggctttgctaggaattgtaccctcattccacagggtttccatgggagcaggtgtgtgcgcacatgtacacacggacgcatatgcaggtgacagctggtaaggtttcctggataagatttcccttttgaggtaggggtcccttcagcaaccccacccttgtaatgagattttctcttcttttgtcacatactatcctacaaatagctttttccccaggtcttcaattaaaaaaaaaaatgccaatgcaacttgcttatactgcaacagtttgaattctggcacaaatgctatttttgaaatacagaagtatggagcattaaatgtaaaaggattggggttatttgtgcatgggagcctgatcccagaaggcccggctactctcggtaagagccaggatgcctagttaatccttcaaagggaaggccccacaggctctctctggggcagcctgaggtggcaggacaaatactctggggtcccgtattccttttctgtggtggagacccaccaacggagggagtgaaacagctgctagaactttgcacatcccacctcttcgctttgcccagggccagggcctgggcccactccctggaatgggagaaaggacagtaagctgtgttgccacctaccgagtctactctgtgcaaagcctgaagtctgaggaagaagagtgcttttaattctacctctggaactaggaaattaatatcagagtataaatcggccaggaaaacataagcctcaagggtggtatctgccctagccggggatgcaaaggtcactgtttgggagtggttagaattatttcagcccagagggtccagatggtgacaagccacctgaaccacaggtacctgggcctggagaactgtggccctatgacaaggccactgggagttcatgagtaaacaggggctaagtgaattggggctgtctgccactgaggagggggaatgggtgtgcagcttggtgtgggatggctggattatgttaggtgtgacagtttggaggatgaataaatgaaagggcaaattatgcatacctggggccaagaagtggaaatccctgctgagccctcctccaccccccaaagttaccacaggaataaccactctgtacaacaggtcttgggaggccacacaagaaagtgagttaaactctgggtggctaaagtggaaataaggccaggcgtggtggctcacacctgtaatcccaacattttgggaggccaaggcaggcggatcacttgaggtcaggagttcgagaccagcctggccaacatggtgaaaacccatctctactaaacacacaaaaattagccaggcatggtggcatgtgcctgtattcccagctattcagaaggctgaggcaggagaattgcttgaacctgggaggtagagtttgcagggaggttacactgagccaaggtcacaccactgcactctagcctgggtgacagagtgagactctgtctcaataaataaataaataaataaataaaatggaaataaaacttcagagagctctgtgaatgtgttttctgccacatggaaaaagctgaatgagaaagacacagaaacagaaagcagcctgagaagaaacatgactgaaaggactgggagagcccaccctggcttccacagctcctcaggcccagctaagttcttgcccttgggctcagagaccctccagtccttacaataaattcccctctttgcttaagcctgttagaattaggtttctgtcacttgcagcccaaacagtccccaccacacacccaatgaggaaaaatgcagatagaaaaagggaaaaaaagggccaggcgtggtgactcatgactacatgtaatcccagcactttgggaggccgaggcaggcagatcacttgaggtcagatgttcgagaccagcctggccaacatggcgaaacctcgtctctactaaaaatacaaaaattagccgggcgtggtggtgggtgcctgtaatcccagctactagagacgctgaggcagaagaaatcacttgaacccaggaggtggaggttgcagtgagctgagatcacgccactgtacgccagcctgggggatagagcgaggctctgtctccaaaaaaaaaagaaagggaaaacaatactgcaaaattatagcaatatttcttcttttctcattttttaaacttccaataatatgatttgctaatctgtagattagcaaatttttcacaaagtagaagttttcacaaagtagaaaggagatggacaagctagcaggtaggagagaagcttgaattcgaaggagcttcagcaagtgcctaagttccacatgaagcactttccacctcaggatagtaggcaagtcaaccacctttgatcattaatctccaccaaacaagggaccagagtttagaaacacaggggtctcccaataagaatgtatgcatccaagaataagaagagtttgctgttattaaagcctacagtacaaccataatgaactaagtgcccccaagtatatcttatcacagtattaatattaaaaagggttaatattcaccaaaacatatcagtgctcctttgctactagtggaagcactagtggaaacaaaagccacctgccttgtctgagcatcttggaagccactggaagagcaacattctacaattggtttatggatcaaaataaaacactaatcatggccgggaccggtggctcatgcctgtaatctcagcactttgggaggccgaggtgggtggatcacctgaggtcagaagtttgagaccagcctagtcaacatggtgaaaccccgtctgtactaaaaaaaaatactaaaaaatcagccaggcctggtggcagacacctgcaatcccagctacttgggaggctgaagcaggagaattgcttgaacccgggaggcagaggttgcagtgagctaagatcataccattgcactccagcctaggcaacagagcaagactctgtctcaaaaacaaaaacaacaacaacactaatcacatgactaatttagtcttggaaaaatctcaaaaatacaaagtttagagagaagctgaatttggcaactgagaattctgtcaatcacaatgtctacagaaatgccacaaactattacaactggcaggttcttctcaaggctctcaactgtaccaaatcgaaactcctgggagccactcggaacagtgttattctctcataaggcaaacaaaaatgacaaattttctggctttttcccctctggcatttttaaaagcatgaacatgcctgagttcaaatgtagttgctatagctaacatgaattaaacatgtttccagatgccttgtgtgatactgagcacagctgagaactatttgtacctgaacactgaaaaacgctgcttcacaaagatgaacttgtgccttgtctttgcccagccatttcagtcctcagtgctcacttttctctacaagcaacataccctacggcacacacactggtttccagagagcctgaaaatggaaagaaaatgtcgagtctgcagatctgtttcaagttaacaaccatttgaaatttgattcagttttaaaactagtagttgggaggttaaaaaaaaaaagtggaatatatactcctggctttgatggtgacttgtaggaagtaaccaacagtaactgtggagggtgggaagggtagtggcaggcatctagtctagcctaaaactaaacatccattagctaattggtccccacagacatcagactctgtccagcatgtgtcactcagtgggcttcagcagtataagggtcctcactgcagccctactcagctggactgcagcaagtctccctcctatgaaagccaacacaagaccagcactggatcctgatgttcaatgttctgatcataaagcaatgttacggctggacgtggtgactcacacctgtaatcccagcacctttgggaggccgaggtgggcggatcacttgaggtcaggaattcaagaccagcctggccaacatggtgaaaccctgtctctactaaaaacacaaaaattagctggatgtggtggcagtcacctgtaatcccagctacttgggaggctgaggcaggagaatcgcttgaacccaggaggcggaggctgcagtgagccgagatcacgccactgcactccaggctgggcaacagagtaagactccatctcaaaaaaaaaaaaaaaaaagcaatgttacacaaaatccagcagcttccccattcataaaatccaccattcactctgcatttactacaaagatacagaagtggctatcaactgcttatgcagagatgattgaaaggtacatcaccaacaatttaatcattccctaatattgtgaattcagctaattgttagggctcttccattaattaactacttatatatatttcaggtaagaaaaaaatattttcttaaatgccttctgaaataacttcatttagaaaaagttttcagtaaagagaattatggacacaggggcagacaggtgttcaaacagcacaaaaacaaatgaaatggcctctaacaaaaaaccaccagtttctaaacttgcatttgggactgactggtcaggcagggaggcaagctcatcagtggctagagaacaaccagcaaaaaaaccacagcttcctgggcatggtgactcacgcctgtaattccaatactttgggaggcccaggcaggaggattgcttgaacccaggagtttcaggccagcctgtgcaatatagggagaccccatcttgacaaaaaaaaaaaaattaatttgccaggtgttgtggtttatgtatgtagtcccagctactcaggaagccaaggagggaggattgcttgagcctgggaagcaaaggttgcagtgagccaagacagtgctactgcactctaacctgagcaacagagccagactctgtctcaaaataaaacaaacaaataaacaaacaaaaaacacagggcttgatttcagcagccttatcactgaagttttggtttgtttccacttaccactgccttgttgccccctgcaatggtaagtacagcagggaagaccctgcaagctcctctgagattcagaacgtgtgaaagctgaatgttccttatcaggggtttcagaaatgttgcttttgccaaaaaaaaaaatgcagcttgtcaatttcagacatacatttcaagaactgattcccaggttgactacctgataacaagggtcagggccaggtgtggtggctaatgcctgtaatcccagcactttgggaggcccaggcaggtggatcacctgaggtcaggagttcgagaacagcctggtcaacatagtgaaaccctgtctctactaaaaatacaaaaattagccaggcgtggtggtgcacacctgtaatcccagccacccaggagactgagtcaggagaatcgcttgaatccaggaggaaggggttgcagtgagccaagatcgcaccactgcactccagcctgggtgacagagagagactccatctcaaaaaaaaagggtcagaaataagatcattaaaatggcacagacttttcacctctaagtcaatggcaagatacagtgtcatgcacacgtgttccatacccacagttttccagtgatctatacttaacgaggtttataatctctgctccatttacaaaactggagcatcttatccctgcaaaaaaaaaggcgtgtacacacacacacacacagaaaacctacgattgtgaacaagagagtcacacacttctcaggtggcatgtaaatggatcaagtccaacccaactgtacatccctctctcttttttcttcttttttcctgagatgaggtctttgtcacccaggtgggagtgcagttgagcgatcagagctcactgcagccttgaggctcaagcaatcctctcccctcagtcttccaagtagctgggactacaggtgtgtgacaccagcctggccaatttttaaattttttgtagagtcgggagtttcactacattgaccagtctggtcttgaactcctggcctcatgcaatccttccacctcagcctcctgagttgctgagattacaggcataagcttaaaaataataataataaaaaaaagacttcaaataaaaatcttttctatgaatcttcttcccatcacacctccactccaacagaccagaagtttatataatcatctggctaataataaaaatttgttttaggaatatcacaccaatgtctagaatttgttcagaggctggttttttctctgtgtgtgtgtgtttttgtttgttttgctaatagtcctctgtgttcattggattactgttatattgcataatcccaactttagttttatttatttaaggttaagaaaacagccgggcacagtggctcacgcctgtaatcccagcattttgggaggccaaggtgggcagatcacctgagatcaggagttcgagaccagcctggccaacgtggtgaaaccctgtctctactaaaaatacaaaaattagccaggcatggtgtaatcccagctacttgggaagctgaggcaggagaatcgattgaacctgggaggcggaggttgcagtgagccgagatggtgccgttgcactccagtccagcctaggcgacaagagcaaaactccaactcaaaaaaaaaaaaaagaaagaaaaccattcctccaaactaaaaatacttacataatttgagcaaggacaatagaatatcatacaataccatgtgtacctcagttcctggaacccgcaacctgccaacaacagccaggctgccttttgcagtgcagggttccttgccaggactcaaatctactggatggttggcacagaggtaaagcaataaattggcgttaagggttccttttagttggctactgaatacatattacagtattaaaggtaagacttgaaacaagttatgcaagtgagagaaggattatataagaaagatttccaagatattttgttttactgcccagttaggacatatgaaatcttgagaacaattaaaagtgcatgttgctaaatgtagaataatgatttcaagtggattagaatgtgctaaggaattagagcttataattattaaccttggcaatcatgcttggaggtgggaagggcatgccacacaggggaatgtgcctatgccaaagcacctatcaaaaaaagcaagataaggctgatccaccacacatgtggatgtggtgaggggtgctgtctagatggataagaaagtaggggttaataatgagtaatggcaaatagactggattattctgctggctataaccggctgaaagccacaggatggatcagctgattttaagaaataccagtaagacactttctggcatgccataacaggacaccagtcctacagggtttcttacacacacacacacacacacacacacacacacacacacacacacacacaagctcgctgtctctttctctcataggacaccagtcctacagggtttcttatacacacacacaagctctctctcactcaacctgtgcagtaacatcaaaacaacaggaagaagtacctcaaaatggtattctataacacagacccttgaaaggcactaaaggatattcaaaacaaggacatctgtgtctacaattcttctacttgcagcaatattatctgtctcagactataaactcaaagcctgggcatttgtgattctctgctttataaaggcagccagcagagtaccgctttctaataccatttcatcacatagtaggagactgtccgatcatggccaaaaagacatcaaaaattcaccaaagcagtagaacactgaaatcagtgcccagtaagtgcaaaggtccatgacataaaactctctcaatgattaaagcaagccctcagagtaaaagcctcacaatgatcaggaggggctcaactctccgctcacaaaggactatctttgaagttatgttaagtaaagacttaattaagacagatacaaaaaaaatttgttttgttttgtttctttgagacagggtcttgctctgtcacccaggctggagtacagcagcacaaatcatggctcactgcagcctcgacctcctgggctcaagcgattctcccacctcagcctcccgagtagctgcgactacaagcatgcaccactatgcctggctttttatttcattttttgtagagatggggtcctactatgttgcccaggctggtgttgaactcctgggctcaagcaatcttcccgcctcacctctcaaagtgctgggattacaggcttgagcggctggcctacaaaacagatttttattcaaatcaaaccctgttccctgaccctcatctcatttacacatactgcagcaaagtacttatacccaaatatggagatttctatacagccacctgaacagtgagtaacaaatatttcactacttttagtctcctgtctgtggaagaacattcagaactgaattaaaacatcagccatagacacaaacaaaagtcttactgttttaaagatttcagtccaccagtaaatcattccaaattctgttatacttcgtttacctgtgtgtaggtcagcaataatccatcaaccatacagttccttctaaccagtctatcggctgttatgtttcctgatattaagtcaataaaggcaaccatgacatttgctttggatgggagtcaagtgtctagctgggatgcagaaaaggccaaggcctaactgaacagcactgtgtggtttccaaactaagcagctgagagagttaaactttcagtgtttgtggcaagtctgccgtatggtgtaattaaccaccacccaagacagttaggactcttcttcagtttaggctactgtcctcctttaatagatctgattaaaaaaaaaaaaaagtacctcataaatccactgtattcctgaatgcaaaggtatgctaatttcataataggtgaatacagttccccccaaactggttttggggcctgggctgagtgtctgagttcaaccatttgcagttctgtttatgttcatggttgctctgccatcaacttacattgccatcattggaagaagaaacatatctggacatgaatggtgctacatgaaatcgttttccctgacgtggttaggaaaacaagccctttttcttagggtggtatcaaatccctaaggtccctcaggatacctggggagctaagccaaatcccacactttaggaaaactgaaacccaaggttacatgctcatttagtggctgagctttagaatgcaggtgtcactactctattttgttgtctttgctaaagggaaacagcatcaactgatatctagtaacaaccaagaaacgtatcaggctaatttactttaatggagaaacatcctaaacaaactaaactaatacaggcctgacagactataaatttgtatgtgcaccattggccttacaaaaagtcaaattttatccatttgagtatgtctactcatatgcagttaaacctactattaagaagtcctggccgggtgcagtagctcatgcctgtaatcccagcactttgggaggccaacgcaggtggatcacctgaggtcaggagttcgcgaccagcctggtcaacatggggaaaccccgtctctactaaaaacacaaaaaattagctgggcgtggtggcgggcacctgtaatcccaattacttgggaggctgaggcagaagaatcacttgaacccaggaggcagaggttgcagtgagctgagatcgcaccattgcactccagcctgggtgacaagagggaaactccatctcaaaaaaaatagaaaaaaaaaagaagtcctcacgtagaaaccccaagggaaaaaaatttaattacataccaagtttttcagtcctggtaacagcaactaatctgaaactgtcaattttgctcttcatatttagttaggaatttcttgcaggggacagtagaggagtagacaggagagtcaagtagaaagtggaaaaatactctagttaaattaaaattacctacaaacaactgtatttatgacataattgctacctacactggccagatgttgccaaactttaggctagaaaagaagtactatgaaatacaccccgagttgagatatctggcttgactgacttctgccagccaggacccccattgtttgaagttgatttgaggatcacacacttctctaccggcccaggccaccataccaccttcctctctccaattagctggataatcctttaagtccatgcggttccacacaatgcagatcaaccagtagggactgtttactgcttctgggatgtgtaatttttgagatgaaaaggaccgaagagattaccttacccaaccctctcatttcacaggaaaagaaatcaaggctcagagaggtgaagtgacttgcccagggcaccacagacagttaaccatagacacaggactggaaccaaggtctccgcctccccgtctagcccttttgcccactatgccacactataatttcactactttaaatcacggttcactgagagccaaagcctaaattacttcaggcctgaagctccccctttgaatcctgctggggtagatgaagatcagcactccactttgatatgagggttggatcttttggatgagaccaaaatgtaatttttagagtctctatagaaacccaatataccaaatggcactgcaaattatacagggaggggtctttaaaaaatgttcagcatgaaaattcctgagatctcactgtacatctaagtgggtgggaatgggaataacacaacaaaaggtcaaaggtctcagctttaaccaccataaaaaaattcctacaatacacacttacccaaaccagtctttttaaaaaaagtttgtttttattttttacactgacatataaaaattatatatacttacggtgtacaacatgatgttctgacgtatgtatacattgtggaatggctacatcaagctaattaacatatccattaccttacatacttatcatttttttgtggtgagaacatttcaaatctactctcttagccattttcaagtatataatatgttgttattaactatagtcaccatgttatataatagatctcctgaacagcccagttctaatggttttaaaaaatgtcctttgatgaagacgatgataatgtagccactgccaattcctttgatgaagccaacattcttttaatgtcagtgccaaggaaacgcgcattactgatcagcacaggacaactcctttgaactgtaaggcccattttaatgaccaagcataaactgatgggccccacacagtaagctatggctgcttcacttggtagcaataagatgctcacacaaaagaaagcctattctgatactgactttttcatgtcaatattacatcagatttctgtaatttcagcataggttttctattatctaggcttctctgagaagcgatctttatgcagcctcacacgtttgaatagagattggaaagcacaagaaactgctgggaagactgtgctggcacaaccaaaccttccgagttgaggctcgaaaacaggactcagaaaaaggggcaaagcatgaggaaccggccaagagcgaacaacgttgctttctccagcttatcaagtggtcggcaggaaacagaagcaggaaagaattaccagccagaagatagcaaacctatgggctcaaagaggaggcctttccagacatcaaaggaagaactccctcgtgaaaagggaaaaatggctgtcccaggcaggaatggacaagggaccatattataaaatattttttaaaagtttgtttttattttttacattgacatataaaatttatatatacttatggtatacaacatgatgttctgatatatgtacacattgtggaatggctataatgatcctataaaggatattctctgctgtcattctcagttttcccaggaatctctctttctaaagtcactaccctggtcaggcttccgcctagcctggaggtcatccaatgtttttttttttttttgagacagagtttgactcttgttgtctaagctggagtgcaatggcgcaatctcggctcacggcaacctccacctcctgggttcaagcgattctcctgcctcagcctcccgagtagctgggattacaggcacatgccaccatgcccagctaattttttgtatttttagtagaaacgaggtttcaccatgttagccaggctggtctcaaactcctgactttaggtgatccatccacctcagcctcccaaagtgctgggattacaggcatgagccatcgcgcccggccaggtcatccaatcttattgccatcttctctaggtcccagaagtggacctgggcatctggattgtggggcaaggtggctaagcttccacatttgttttttcttttaaaaactgaagaatagcaacatctctctaaacactaagaaagcaaaacaaatattgagaatttcaaaagtaagagttatacaaatattaagggagactatttaatttaaaaaaaaattggtggcagccaaagaaatcatcaggaagtaaaccaaactcaaaaacctgataatccactgctcctcatctcttacctccattgctcctcatctcttaccctcatgggcagacagcaataatgtaacaactggtgctaggagacaatcaggaataattaaggaagagttaaaatatgtttggctcgtggtgttcaagaaggaagcagtggccgggagcagtggctcatgcctgtaatcccagcactttgggatgccaaggtgggcagatcacttgaggtcaggagttcaagaccagcctagccaacgtggtaaaaccccatctctattaaatactcaaaaattagccggacacggtggcacatgcttgtaatcccagctcctcgagtgggtgaggcaggagaatcacttgaacccaggaggtggacagcgcagtgagctgagattgcaccattgcactccagcttgggcgacagaccgagactctgtctcaaaaaaaaaaaaaaagaagaagaagaaggaagcagagtataactgctgaggaggttgtcagtaaacattactatattttaagttatgggattgtatttccatcatttggaaactcacctatgatgctgcggctaaacgattcaatagatacttgttaagttcagtgtagttcctgagcagtataatgtggttgttaaaaaggtagattgtggagccagaccacctcaggcaatcacttacctctctgtgccttcagtttctcatccataaaatggggataatgctaattaactttaaaaagttgttgggaaaagcttctgcacagctgaacacatggagattcctgatgggtggggcataccccaagggcatgagatctccatgccccttcccgcatgccttgccctatgcgtctcttcatctgtatcctttatcataaaccagtaaatgcaaaagtcaccaactctagtctaattggagtgggctacacacagactctgaggcctggtgtgaggctcacactgtctgctctggtagacaagagatcatcaatgctggagatcacaaacttgggtgtgctctggaggtggaggcttaatctagctgaaagaaacctctgggaatggatatcagaagatcgggccttaatatatttccactgtgactagcaggcttttttcccaagaaggtgatccaaaggatgatctaaacaaaagctgtattttaaatattttaacagttactggttagttggttccctggctatctagttaccagtgcggcatcatgcagtgacctatatgtttaagctgttaaatgtgctacccccaccaataatgagatagactttcatgagaactgtgcagctgtgtggatgtttgtttttatgttcccttaaccactgcatattgccattgaatgagatggatcagtggatattttaggatgaggttaaaaacattttattaaattcaaccatgattcacattacttttgctatcctagaccattacaaattatgaataaaacaagtatacataattagtggctccaagtattcgcagagttaaacatttccagctatggccaaatctccctggtatctaacactttatttttccagagcattttgccctttacgtaaatctttttttttttttgagacagagtctcgctctgtcacccaggctggagtgcagtggcgtgatcccggctcactgcaacctctgcctcccaggttccagcaattttcccgcctcagcctctggagtagctgggattataggcacgagtcaccatgccgccaggcaatttttttgttttgttttgttttggagacagagtctcactctgtcgcccaggctggagtgcagtggcgtgatctcggcccactgcaaccttcacctcctgggttcaagcaattctctgcctcagcctcccgagtagctgggattacaggcgcccaccaccatgcccggctaatttttgtattttcagtagagatgggggtttcaccatcttggccaggctggtcttgaactcctgaccttgtgatccacccacctcggcctcccaaagtgctgggattaccggcgtgaaccaccgtgcccggtgacctttacctaaatctatgccacaaagtcctctgtgtccctagaataattccatgggctttcaaagactgtaataagaaggtaaatgctaaaaaaaaaaaaaaaaaagcttttgcaaggagtgttgagtcaacataagtaaagctcttgaacgggcctaatatacagtaagcatcatgtaagtgtcagttactattattcattaagaactgtatgagacactaggatctaatcacaacaaatgagatctggtttcctgctttcatggagcttacagtccaataggagaccccagtaatcaataatgacacaaacataaaatgacaaattgtagtaagtgccatgaaagggacatactggaaactgcgacagcataacagaagaagagcatctggtcttgtgatggtgggggaagcacagtgttaaaaatgatgtttgagttaagatctataggaaagggagaaggaaagaagaatttcctgggcagagggaatagcctatgcaaaattctgagactgcagagaatttgttgtgtttgaggacccggtggaccagtgtagctggacagagaaggcagaggggatatgggacacggtgaggttgggggagaagtcccagaatggcgtgggccacaagagtcagaatcttttttttacgtgtcttatttgttatctatgcagctgaaggaaagaacaggaaggttgctgttcacatcgttgtaaagccacctggaagaaaaaaaagcactctccctaaggtgaggcgtgtaatacaccaaccacaatctgttcacactctcggtgagtctcctccagtgttttaatttatactaacattcgactgatgttgcctagctggtttacagctgaatattagcagaacacatcagaacttcgtaggagagcgtagtaaatatggctgtttttgtgatgaaatgtggccttcagaacaaaccccaaggcaggttttcttgcttcctaagactcctcatttgagggggagccatttctctgactagccatcatgcatggaatcagaaagctccctctgaagggttgaggagttaaacctgcaccttcccgtctttttaatcttccaggcgccccatctccacagtacctgcagtcagtgccaggactattttcattacaagaggcagaaatcttggggatactaaacttacaggacaaggtaagtcattggctcatggtctcacattactcaagtaggctggcaaggacttcaggatttgccaatctcttccaggcactccctgcctcatacttcttcctgttggctgactcttctatttcaactcctgtgtgctagttcacttactccaaccctgcccctaagctggactcttatcctacatatatgcagaaagaagggtcctgttacacacaaggcaatgccgccccaaggcctgtaaaactcctggcttcaaggggtttgccgtctagcaggagagtcgtgtaatgcagaaaaaaagacggcaagttccatggccgaacttcccgaaagctgacttggcagcatatccaggtcctgcccagagcagttccaagagtctggtcccaccctaccctgctcagctgtcttctcactccttgccctagcctgtgtccatatagcttcaaaacctgttattttatcctctcaaaactctttggtttaaaaacaaaaccaaagttcctcaggtatcctcatgagtctggaacatatagatgcttttggggtgaatgaagctgacagaagatgaggtgggcacacagatgcatggtctggtttgagctctgggcaagtcattagatttttccaggcatgggtttccaagaaagtaagaagcctgaggtggatggtggctgcagctctgaagcatgatgatccatgacttaccagaccctcatctctcctcaggctttgctgcagcttcttctagccccaaccaatcaaaacatgcccaaaatccgcataacaatttgacagagtttagaagtcctaatgcctttgaacatagtcatttccaatcctggtcttgcaacatctaagtgtctccgcttatctcaaaatattgcaacattagaaattagtaataatctgactcactttaaggttcaggatggggaaaagaaataccatgaaaatcaactaatgttacatgggaccaggtggctgattcccaggcacacctacctactatagactctaaaagcaaccatctcctaaactgaaagggtgataccttttcttctgccaaccacaaatcagataagtgattgaacttttaccaggcaccgaaagccccagagatttccaagcactgaaccatcaagatcaagataacttagggtccgttttacaagcaactgtggcttggttcccagttagtcgagcaccaaaactacagataaacttgttcttaatctccacatataaaggaaaccgttttcttctttgcaaaaccagctcatggcaagtggaaaacgaaccctaacagaattctagaataaggtcactggattgctcataatgaggtagtacctttaaaggtcagagattccccaaatttgttcttagaactttcttaccgcatttcaatttatcgggagatgttacaaatactcctacaatggaaaaaaaatgtaatcttatttaatgtaaaaaaaaaataacacacacacacacacacacaaacacacccatttgtgtatttgggtgcacagccatcacaaaaatcaaagaatggctggttctgacccctctgagttgtgggggttttctgaggtttccctgacaggatttaatgtcttatcatgttatccttaaaaatcaacaacgtggccgggagcggtggctcatgcctgtaatcccagcactttgggaggccgaggtgggcggatcacaaggtccggagattgagaccatcctggctaacacggtgaaaccctgtctttactaaaaatacaaaaaaaaaaaaaaaaagccaggtgttgtggcgtgtgcctgtattcccagctacttgggaggctgaggcaggagaatggtgtgaacccgggaggcggagcttgcagtgagcagagatcatgccactgccctcactccagcctcaacgacagagtgagattccatctcaaaaaataaataaataataaaaatttttaaaaaaatcaacaatgtggccaggcgcagtggctcatgcctgtaaccccagcactttgggaggccaaagcaggtggatcacttgaggccaggagtttgagactcacctgggcaacatggcgaaaccccgtctctactaaaaatacaaaaattagctgggcgtattggcacatggctgtaatcccagctactcgggaggctgaagcacgaaaatcacttgaacccgggaggcggaggttgcagtaagccaaaatcacgccactgcactccagtgtgggcgacacagtgagactctatctcaaaaaaaaagaaagaaaaagaaaaagaaaagaaaaaagaaatagaaagtaaagaaaaatcaacaatgttcacgctcagtccctcatatttgctcaggattttcagacatacctgaggactatcaacaccagtcctccagaagattagacaagaaacaaacaggagcaccaacctgtacattaccccaacactaagtgacgtggtgctatttggagtgcaggaagggatctagtctacgagagtacagtggtcagggaaggccctaggccctatacaagacaggtgagcgagagccgatgaaaccacaccacggtgtgtggcaacttacgaggcctccatctcccttgctctgctctatgtttctcccctgcaacccctgcagaattttatcaccttatcacattctatataatgtatttaccatgctgttgtctatcccaaccaactaggtagaagttccatgagggcgggggtctttgttttgttcatgtttcccaagcatctcaaacagtgcttggcataaaatatgtactcaaaaagttgataaataaatggatgaacagatgaaattcactacattcaagagctaggaagctgggaggctcaaagcaaagcagccctcccatcttctacctccccgtatgaggctgcaccagaaaaagaggcggctgggggactagtcgctttcacctaaatggtgatcctaatttgggaagacatttggaaacaggcccaccaaagagattttctggttccgttgctttgttttacagatgaggaagcagagggggaaataactcatttgcccaaagttgcacagctagctagtacagaacctccggactctcacttgctgaaagaatgcatacaatttcatcatatggggcaaacacacatatagaaacaagatactggccctatgattacatttaaaaacagctaaaatgattttacatttaaaaacagctaaatgcctatctgctcaaggagtgcagaactggtctgccacttgggatttcctttaagcattaagttaaattaggaaacagccctggtgctggagtccacacagcgctttcaggccaggtgccaagccccattccaaggttgtattcaaagagcgggctcccaattctactgacatttgtcaacttggttccagcagagttttggatttggtccagcccactcaatgtgatgcttgaaagcaagtgtcctcctgtttctaaaccagctaataaagatcctctgagaaacaactgagatgggtccgggagctgagacaactgactggtcctctcctgtgttctacagttgggcttgtcagctcggcacctgctataaaaacccttcgagggaactctgcctgactcaggcaatgaggctaatagccagctctcacatgaaaaggggaagggagtgtcacagcctgcaccctcccaccatttgcttccaaaacatatgttcccaccctgataggaaagttcctgttggttcacaagcttcttcttgtgctttaactaactcactccttctacaaatcccttctcctcactcgcaatggctatttcatttttgttatggaaggttcttttaaaaccatgaagatgattttacccatcaggatactgtgaaggagcctggaaaacaacattgttttgatttcttaagcctcttaatatatggaaaaggcaataaacaaatatataaataaataaacaagcataagtcgggtaactttaaataaacatttaaacatcttacaattcagtaactaaatatgttttaatataaggcctattagttaaagctgataaaagcaatttcaacagtttgtattcaaaggaaaaaatccattaaattacctgctctttaaaagttgaatgatatagtacagtagagaaaatgtaatattaggttcctttttttctaggtttttttttttttttttttttttttttttgagattgagtttcactcttgttccccaggctggagtgcagtggtgggatcttggctcactgcaacctctgcctcctgggttcaagcaattctcctgcctcagcctcccaagcagctgggattacaggcacgcgccaccacgcctggctaatttttgtcatttttttagtagagacggggtttcaccatgttggccaggctgatctccaactcctgacctcagatgatccgcccgtctcagcctcccaaagtgctgggattacaggcatgagccaccacgcctagaactagaaataaagttagaactttatttctagttctaacactaactagcggactctatcaatcctaacctctctgtaaaatgagccaaatgctgtgtctagtctggtcccgtgctctgtgacgtgactgggaatttggagatgcatttgttctttccaggattaaggtacaaaaattacttgaaggcctcatcctggctgcacatcagagtcacttgggccttaaaacattttttgctggtttatttggtagagatggggtctttcattgttgcccagtctggtctcaaactcctgacttcaagtgatcctcttgtcttggcctcccaaagtgctgggattacaggtgtaagccactgagcctggccttaaacattttttttttaaaaaagaaaagatgccggcccccactcccagagattccaatttcattcacataggatggggccccagcacagcgtttttaaaaagctccccaggtgactgagtcatggctgggaagcaccgcctcaagtaacacattcctagccacagttgtggccccctgtacaggtgattctctcactcctagtggcccctcaggagtcatgggccatttgctttaagagaagagagatctgatttaccttggtcaacaaacttctctgactcaactggagatcaatgacaatgtcaggttctagggatgtgacagcactgtttgttcagagaatgtacagaaaaattcggtttccatgacagacactcctgcagcccagacaaacaattattccttcatctgacagagaggggggaaataatccactggagaatgggatggttttgaattataattataaattagtctactaacaaaggaagtcatgtttaatacatgagaggacaactctgggccaaggttcatttttttaacagtgaaacatcatgctgagtgaaaaatgaaactgacatgaaataatcacaaactgtttacctcatggagtttggcaatggaaaaattaatctcattactgataagaagagcccaccaaaagaacactacacactatgggtcacgtccacccaagcaaatatcctgaaagctcctctagttctgtagaaagacacacaactggtgcaatcccattaaagaatataaaatatagctgaagcaatacctcccacccccatccacaacccacttgcttgatgatataatacagcccctttattggtcttaatgagtctcaaagaagaattcaataaatatttgctgagtgccccctacagtgggtataaccagcatgccacgttaaatgccacagaggatgcaaccatcagcaagccagggtccctgccttctcggatgaaccagcaagggaagtgagacacactcccaggggcaccttccttccccccttgctccttccttccctcattagtctcctctgagagctacctaagctaacttgaatccctccattgtggtttaagagccagagtcacagccactgtctctctcctgtcatcacagacctgctccctggtgccagaactgcttggcaggtggcgcctctgcaaaggcaaacacccagaaccagcacggtaatgcaagagttctatcttttcaggacttcttggtgaaggctgtgactgagctagagaagagcggcttgggttaaaggcctctaaggaaagaactttcagttttgttctttcagacatatgactaggcgagatgttactgaaaacatgcacctgcttggatattattagactccaagcaaagaaattagcttaaactgtgaattaggcttagcaggcaattttttgttgttgttgttgagacggagtctctgttgcccaggctggagtgcaatggcaggatctcagctcactgcaacctccgcctcccaggttcaagcgattcttctgcctcagcctcatgagtagctgggattacaggtgcccgccaccatgcctggctaatttttgtatttttgtagagatggggtttcaccatgttggccaggctggtcttgaactcctgaccttatgatccgcccgcctcagcttcctgaagtgctggaattacaggcgtgagccactgtgcccagccgagcaggcttttaatccctactctctccatgattgctggatttgactctacagttgaaaatggccaatttccttgatggagactctcaggtgaaggcagcattcccatctcaaaatggcatcttcgcacaactgcaacaaagggtagaaggccatgattcttaacggaggaaaaataacattatctgggtattttcctgaagcttacaagaaagcctactggcctagaccttctctagatccttctctcatggccacatagtttggtcagctcctcagggtatgactgagggtagccagactggtttgtcccaacatacgcaccagaacataagcactgcaggggcttctcttcaaagggaggtaggaggatcaagtttaaggtttggttctgccactcacacatgaccctggacaggttaccagcccttgctggttgccttttcccatctgtctgctctggaagacagagcagggtagtaatttttctcagcttgggagaggagggtaatgcctgagagagggtgccccaaacaccaccctcctaggttctgatgtgctcatactgttactgagggatgtgcgccatatttcttatgtgcagctggaaggggaaaaaattgagactcattggactacatggccgagagcccatcaagcagtctaatgcactctgattccagttatcttgggaggctacacatctattcatacatgcttctagggctcaaaatatttctggaattctttggaaattcccttcaaagaatatacttttgaatcccctaaatggtaaaaatcctgttcactttaggatggatttcattttaataaatagctgaaaaccaaatccaagtgtcctcaataaattgtgtgatcaaactgggtaataacaattttgatcaaaagtgtagtgtgaatcatgtaaaagtcctattaagcaaagactggaaggaattggagaatgttttaacttgtataaggataactggcttaagagtaaatatttgttttcaaaggttcgtttttgttttaaagttgaattattaaatgggttagataagttgttaaatttaactggaaatttttttaagactgatttcaataacccgtaaattcacgccaaagggtgattattttgaaagggacattttttttggaagaataaatttgcaggaaaagcaaaacaaaacaaaaaataaaacaccacagatattacattttatttttaattttttgttccctttttttttccaggtagataatcccagcaaaaggtagtactttattatcaagtggtacttaaatattcctaggaaaaacagccacatgttttaagaactgcagcctccaaaagggacaatcaatgtatcaactctgatttatgaagtcttaaggcaaaagttttaaatggcctcacaaccgaccatacaaagaatcttatctgtaggaggcgggccaccctcaaaaccagagaattatcccgaggtatttcagggtgctcatgggtgccacatctcctagaaagttgatctgaaaccactgcaaactaaaggaccccacaaatgagtcatttaacaaatccaaataaaacattttctcaatagcttttaggtacaaagggtatcatccagagactgccttggtttatttacatcttcaaaatataaacaaaatgtaaacattctattttcatccaacttttaaagtctacgctcctaaaagaaagtggccactgataaaagaaaatagcatactttaaaccgcctatcataaaaacaatttaaggttagttttgtttttaaaacactcaacattgcttagggctgggggagagggctgtaaaatactacatacaatcagcaaatttcaattctaggaatctatctccaggaaataactaagcacttaaaactcattcaagagtttagcaacaagaaagttcattacattgttataatttttataatgaaaataaaaacatatctgtgtagtgaaaaaataaaaaaaaataaaaacagcctcaatatctaaatgattgagtggtcaaattatggtacatccattccattcagagaaatactacgcagccaattaagaataatgttgcagaattaagctgattgacatagatctatatgttccagtgtggggaagaaaagtattacctgtaaatatgtgcacagaaaaagcatctgaaagaacatatgtcaagatattagattagttattagagaaatgcaaatcaaagctataatgagttaccactccacatccaccaggatggctaagattaaaaagataggtaataacgagtatcagtgagggtataagagacactgtaaccctccttcctacattgcaggtgggaatgtaaaatagtgcagctgccttggaaaacagtcagacagttccttgaaaggttaaacaaagagttaccatatgacccaacaatctctttcctagatatatgcccaagaagagtgaaaataaatgtccacgcaaaaatttgtacacaaatgttcatggcagaattattaatagtcccaaagcagaaacaatccaaatgtccctcaatggatggatgatatggtttggctctgtgtccccacccaaatctcatcttgtagctcccactattcccatgtgctgttggagggaccccgtgggagacaactgaatcatggggatgggtctttcccgtgctgttcttgtgatagtgaataagtctcacgagatttgatggtattaaaaatgggaagctccctgcacaagctctctctttccctgctgccatcaacgtaagatgtgacttgctcctccttaccttttttcatgattgtgaggcctccccagccacgtggaactgtaagtccattaaacctacttcttttgtaaattgcccagtctcgggtatgtctttatcagcagcatgaaaatggactaatacaatggataaataaaatgtggtatattcatataatggaatattattcagcaataaaaaggaacaaagtactgacacatgttattatacaacatggatgaaccttgagaacatgatgctaagttaaagaggccagttacaaaagaccacataatgtatgattccatttatataagaggtccagaataggcaaatttatagacagaaagtagatttgtggttgccaaggactaggaggtttggggggaaacggtgtgtaacagctaataggtatgaagtttatttctgggatgatgaaaatgttctaaaatggactgtggtgatgactgcagaattctgtcaatatactaaaacccaccgaattgtacactttaaatgggtgaattgtgatgataggtgaattatatctcaataaaattgtttaaaatcttcatagaggtaatgtttggaaaataagataatagaaggcttgttttttattttttaatttaggcttatctatcctttctaacttttctacaatgaatatgattactttgagataatgcctcaaaaaaaaatatcttcccctgttatcatacagaaagcaccaaacataaaataattgaaaaaatgaaaatacccctttctttatgatccctatggccacagcaagatgactggcaggcaaagctcggcttattaccacatcaaccctgatcagttataaccccagtccccaacccacggctgggcacagaagctcaatgttttttgttttttgtttttctttttgagacagagtctcgctctgttgccaaggctgcagtgcagtggtgtgatctcagctcactgcaacctctacctcccaggttcaagcgattctcctgcctcggcctcccgagtagctgggattacaggtgcatgccaccttgcccagctaatttttgtatttttagtacagacggagttttgccatgttggccaggctgctctcgaacgcctgacctcaagtgattcacccgccttggcctcctaaagtgctgggattacaggcgcaaaccaccaagcccggctgagaagctcaatgtttttttacatggatgatggtttactaaggtgctactaaagtgacaaatgtgatggtgtactcagaacattttctaccgggttacagaagatgttctgtggggaaaaagtgaacaaaaatagataacatcgtatttttataccgttgtatttgctgtatgtttgtacatgagcaaagattataagatattgatagaaagactgtctaaaaccagctgtgttgctctaaggcagggaagtttgaaaccaaacatgggatataggtaaagatagaaaggaaaaaaaaaactgcttctgggaaatatttccaaccagtagtttattattcacaaactgtgattcaccagtcctattttttaagccagcatcacgctctaatcatattcctaggttacaagcccagttatttgtgcataataaaaactgaatccattaagatgatacattaggcttttcttccctatgtcatctctttagggagacatttgattataaaacctacaaaatattgaacctacatattactttggatcccgaaaccaaagaggtttcctatgaaaatgaaacagttatccaaggattctttcacctgaaaaacggagtccaaatctggggcaggcaaataatgaaaccctcagacctatgcaagtgacactattccatccagacatgaagaaactttaatgcggctcactagatttatgttcggaaatatgggctattgttgaactctctctcgaataactctcagatacatttttctcctgtgctctgagaagctacattactgcagaaggctgaataggcaggcaagttaatgaaacaatacacatgtgcacaactacagtttaatttcatgatcagcagccctgataacaaactcaatgaacattctacttatggcctcagtataaacacttgatatcgcctattaggataattaatgcaggtgatcactgtcagaataaatgataagcaaagacattgctagttaagactcatctatcagattacagtgtttctatacacacatgatcctcagttctcggtgactttttaaaaacctccctctaaaaccaaaatattggctaaatgaaagaaatctgatatcttatagcttttaaaaaaaaaggtactttgcctcacattgtactgatctctttggtaattgagagatgtggcacctaaataaccataaaatgaggactgctgacagtgatgatgtaaccctaaccaactctaggagcaagatataggtctaggaagaaaggaaaaactcactgactaaataagcacattctggattaacaaaagacagcctcaagtgcttaataataccaatgttattgcgttttggatctggtagcctaaagtctcaactcataatgagtcaatgtctggctcaataagacacacactgaaagaaaatcacagtattgcctccaatgcaatagttactacatcaatcaaaaagaaatatcaaaaactatttcttgcagaggcatagtataacattcaaaaaatgatggcttagagtaaaaagcatctttggagcataaagagaatttacatttattatctattaagcacgtgtgaaggtggtgccttctttcacatgttagctgtccccatttcacctatcaggaaggagtctctaagaagtaaaatcatggccgggtgcggtggctcatgcctgtaatcccagcattttggaaggccaaggtgggtggatcacttgaggtcaggagttcgagaccaacctggccaacatggtgaaaccacgtctctactaaaaatacaaaaattagccgggtgtagtggtgggctcctgtaatcccagctactcgggaggctgaggcaggagaatcgcttgaacccgggaggcggaggttgcagtgagctgagaccacaccattgcactccagcctgggcaacaagagcgaagaaactccatatcaaaaaaaaaaaaaaaaagaagtagtagtagtagtagtaaaagaatatgcctagggcacagctagcaagtgaccagttagaactcaggtttgtctgattttatacccactgcgttctgcacatcactgttgcctggtttaactgcaaactttgctatgagtttcatttacaattttaaaataataattcttactatgtttgggggtaaaaacccttgggagaaaattctaggagtgaaattctgacctttcttttttttttttgagacagagtcttgctctgtcacccaggctggagcacagtgactccatctctgcaacctctgcctcccaggttcgggtgattctcctgcctcagcctccccagtagctgggattacaggcctgcgctaccacgcccggctaatttttttttttttttttttttgtatgtttagtagagacaaggtttcaccatgttggccaggctggtctcaaactcctgacctcaagtgatccacccacctcagcctcccaaagtgctgggattacaggcatgagccaccgggcccggcctgacctttcacctaaatatagttacgctaaactataaccttttgataagggtctggaatattttatcatgaactctgagaagtttggatttctaaatacaaattggaaatatttacacgaactgaaactatagttccaactacagctaaatcgttatttttggctctttagcctaagttattcaataaccaaacactagaatccagtgacaaagtagcaaaaggaaagatgtggcaaaggaaaccattatacacctatcccttgacgttatgaaatgatcgaattcatgtcaaacatttggtcattctgcttataccttcgtttgtgaacagatgccaggcagtagttaccaatccaaggtgaggtgctcaagttcaaaacctgaccttagttgtaaaagtggggtttttatttgaaagaaaaacttaacttccacaagttctattataaagagtctacaaattttcctttatttaaaaaaaaaaaccctgaatttgaaaaaggcaaccttatttatttacttctcctgtttccaaattcttgttactccaagagtacagacagttatttacctaaaatgcaaaacctccaaagagttcacacggtggctggcactcaggcacacacatgtcagtgctctactgggacacctggtacatgatatccctattaaagagtacacagtacctttaaagaggtcattaaacagaacacggacaaatttgccacgctcacatcctgaacaatacattttgtgaaaaacattcgctaatttaggttcttccaaccagaagaaaaaaaaaagccaagtctcccacaaagtgcccccaaatccacagctgagtgaaggtcataaagagttaaatgaatgtaaaccaggccctatcattcgtctcctccagaaaaagatgaaaagacatttctgatggccccaggtgctctcccacgaggagacagtctttcatttgaggttctgaagcggcctcacctcgaacccatgcgggatcttccaagagtgcaattcccacagctccacttgctcaaggaagtctcggtgcacagaaggaagcctgcagcctcccagtaccaagaaaccggcagggcaagtggcagaagccagctctcgggtgagagtccttactccctgttgcattcgttccccaaagttttcgaatttttaaaaagttcaaacaaggattcgaagcgcaggacagacccttcccctggatcccaacgccctttcggctcctccgcggcccccgccaggcagcgccggcgcccgcccgcgaggaggagggtcccgcaggtgggcggcctcctcaggccggggccttctgggacccccaagtgccgtgcaggacgccacgaagttgcgcccgagcccgcggggtccggggagccgctgcccgtgacagccgcgctggcttgggaggctcttcgggcggccgacgcctcggtggggccgcgactcccgtcagggaagctctcccggcccggtgccgcctcctacgcccggcccgagcctcccacggctgggctcacggggcatctggccgccgccgtcgcgctcccagctcggactccagccccggcgccgcgacgctgccccggccccgacccggccgtcgcgagctgtcctccaccccacgctccccggtcactcaccccgaggccgggcagcagcagcgtcagcagcagcagcagccgccgggccggcatggcgaggactcggccctggctccgggggcggtacggacagaggacggggcgggggcgccgcgacgacagcgaggcggtgaccgagcctcagcggacgcagaactgactaggcagcggcggcacccccattcccggccctataagcgctgggtgccgcggcttcttccggtcggggcggagttgcgggcggggacggggcggggccaatctaggggcgtgttcggggcggagatgggggcgggccgagggcgtgccccgggcggggatgtgggaggggctggctcggggcggggccgaaggcggtgctggcatctggctggcttcgctcatgaggcgtcggcggctgtaaaggaccaggcctcggcatccagcgtctgggggcgctgggggatcgaggcgcgaagcttgtctgtggctgggaaagaccggcaatgccccaccaggccgtcccattaaccctgccgagggacctgccgcgtcagacttcatcggggaaaagggcgggacacgggcggtcccgggtgcctagaagcctccttttcgtctttccgccgtggtggaatcatccgcaaggtttaccgaggcgacctccggagcgaaggtttcagcagctaccggaggcttccagcaaacacggcgcagctgccccgcgcggcagtcgcagtgttcacagccctagggttctccagctgtgcctcgtcttctctggggcccctttcttccttttccttgccctcaggaattcccctcaagtcatatccaccagccatcacttccgcttggaatgaaccacggccaagtcactcaccaaaaattataaggaggaaaccatttcggccacttgtgtcacgtgcgttgatgtgacacgtgtggatgtgaagtttgagatggtctgcgtcacaactcgttggagggagtgggtgggttgaggcctcctgcaaggtctatgtgagggtgtggagtactaattagagttaaagagctcggcagctgtttggtcactggcactggcctccactgagagggacatgggtagggaggacacgtcttttgcaaggaaagacagtaaactgagatttggagcccagggaaaggtatctaacttatcctaggagaaaaagaaaacggctatgaaattctctaatttttcctgacttgcttatatgagagcctaagatttttcaggtttgaaggaaaagaataagcactcctagacaaaacaacaaagtagtagtgggggactggccaaatgtccagtctgtgtgcattgtggtcaatcttatccaactaaaacagaccaaaatgacagtaagcccaaatcctgcaaatagagctccccattcctaaccccctaggcctggattacagtgaagggactaagtcctaccgcatgctggagactccaacacatctctgtaagagtgggaagaatcttggcaactgtgaaaacagtagagacattttgaaaagtgttacctgaatgtctaaatgcaaacagaggtttgggattggcagagagatgtactgagaggcccagcactcctgagcagtatagccgggcttccagggaggcctacagccctgaaactgggaggagctctttatttcttgaccttttatcttttctttttagagatgaggtctcacggtgttgcccaggctgctctcaaactcctgggctcaagagatcctccccagtagctgggacttcaggtgtgccccacgacacctggcttgggaggacctctttagtgattacctgtccagtttgccagctgacaacagcatctgttagaccctgtatacttgacttaaaagagaagcttgactgaaaaatgtcactttcacatccccccctctggtgctttttctcaaacagagtaagtctaggaggggaaaatttgctgtactggaactctggcagcccttttacaattcaaaatgtcactgtgaccctgtaacatcagcagatgaaacacaaaggggaatgctgacctcaatttcactcataaatcagttttaaagatcgtagaaagaaaaaaaatctgttccaagaagcctggacagttaggtattatttatcttacactcagttggaccaaatccccagggcttaattgcactgttacatgttctctgaatttctttcttttttttttttttttgagacagagtttcactcttttgcccaggctagagtgcagtggcacgatcgtggctcactgcaacctctgccttttcggtttcaagcgattctcctgcctgagactcccgagtagctgggattacaggtgcctgccaccacgcctggctaatttttgtatttttatagagacggggtttcaccatgttggccaggctggtctcgaactcctgacctcgtgatctgcccacctccgcctcctaaagtgctgggattacaggcgtgagccactgtgcccggccccattctctgaatttcttatgcatcgtccacatgcttcatgcacttcttcacttgattggcaatccagacagataagcactggttttatttatggtggcattgcccataatcttgctctacagtcaagtacttctttaggcagctttttgcttatgataaagtaaaagctgatagcactgataaacacaaacagaaatggaatattttgtagggtgcctttgaagtggacctgaccatataaaagacctgcaaatgggcagtaaatgacctttctgcaagtcacattaaataacatccactgaataaagcaaaggtcatggtcttagtgtaaagataaggcctcttttccaccagtgtaagaaacatatatacatcagattcaacaaagaagtacagcaggatctgactatggggaggtgggagaaaatcttattttcacttccctttaaaccactggttcccaaacttggagagctaaaaaaacaaaacaaaacaacaacaacaaaaaacagatttccaggccaggcatggtggctcacgcctgtaatcccagcactttgggaggccgaagcaggaggattgcttgagatcaagaccagcctagggaacatggtgagaccctgtttctgtaaaaaaaaaaaaacaaaaaaccaaaaaattagtcaggcatagtggttcacacctgtagttccagtgacttgggaagctgaggtgggaggatggcttgagcccaggaggtcaaggctgcagtgagctttgatcgtgccatggcactccagcctggacgacagagcaagaccctgtctcaaaaaaatagaaataaaaagctgggcatggtggctcacacctgtaatcccagcactttgggaggacgaggcaggtggatcacgaggtcaggagttcaagaccaaccagcctgagcaacatggtgaaaccctgtctctactaaaaaaacaaaaattagccgggcgtggtggtgtgcgcctgtagtcccagctacttgggaggctgagggagaaaaatctcttgaacccgggaggcagaggttgcagtgagccaagactgcgccactgcactccagtctgggcgacagagtgagactccatctcaaaaaacaaacaaaaaaaaagaaattaaaaacatatttccaataacttcttgtacccctttccctgactgattcacaatgtccaggggcagagcccagagacctgtgcgttttgcagtttccaccgtacactgaaggcagtcaagatccagggctccagctcaatcatgatgtccagccttcatccctgcaaccatgaatcccttttagtttagcaaatatcgccctctagtgtaataaattatgacccaaaaaaggagcttgtgcctgtctcatttgtgtttaaaacccttcaaaatctcatttaaaaatgcttgtgaggttgatttgcagatagctagtgacaggatagatacctttgaaggcggagacttgaaagaaaaatctagtaaaaccagaaagaaaggtcatggttgaaaactccagtaacatttcaaaggaatagtatctttatcagaataaatcaagtcagtttttttgttgttgttgtttttagtgatatcgctgctgctgcttcttgaactgaacctacagagtgtgtggaagtagttatgggataaatattaatacaaccataaaggggcaaggcgctgtgacttacacctgtaatcccgcactttgggaggctgaggtggcgggtatcttcagcctaagagtttgaaaccagtctgggcaacatagtgacactttgtccctacaaaaaaataaaataattagccaggtgccatggtgcacacctgtagtcccagctactctggaagctgaggtgagaggattgcttgagcctgagaggtggaggctgcagtgagctgtcatagcaccactgcactccagcctgggcagcagagcgagaccctgtctcaaaacaaacaaacaaacaaacacaaaaaacaatgaagcaagagtctctgatagcaagctaaattctcatctccgtcctcccgtcacgtttaagggacattttaaaagttgttctcactgtgaacactttggtttttaggtaaataggactttggcttttcctgttctaggatgactggatttgaaaagattgtgacacttgtttaagaacttccctttaccacagaatcccactcactacacactttcttaggttgcaaaagtgattatttcttttttttcacattataccataaggagtaaaaagtgattatttcttattatcttttttattggctgtttgctgtttggaaatgtgcaactacatgctttatggtatcatcttgtcttatctttactctaagaccatgacctttgcctgatgtagtggatgttatttaattttaagagacaaggcctctgccccgctacctatcactcaccaccccactcccaggttctaccctgtggggtagcttaggctaatcctgactggttatttgttcacttgtctctgggtgttgtatttcacacgcatttgtgccaagtctatacaccgccacagaaagtatccgtgtccccagtttatatacattaatattctcaaagggccaaggcagcaccaagatggaaacggccatctctcaaagtacctccacttcctcactggccaggccgtcctaatcccctgaggtctggcttaattccacagaactctctggaaacttctctcaagcacttcataaacattcttcctcttgtaaaatccctttggacctaattcctgggtttgtttttttccccccagccaccgggcctcttttcaattcaggtatattaagggttcttttctcttgaacttttcctccttggatattaccattttctggctttcctcctgtgtctctgctttttttcctccttccagattctgtgtggtttatttggggggcagggggtgggggtagggacggggtttgagtcagggtctgcgtctattgcccaggctagagtgcagtggtgtgatctaggctcactgcaacctctgcctcccaggctgaaacctccaggggcataccatcctctcttctcggcctctggagtagctgggaccacagacaggcaccatcacacccagctaatttttttatattttgtagatgccaggcgagtgggtctcactttgttgcccaggctggtctcaaactcatgagctcaagcaatcagcctgcctaagcctcccagagtgctgggatttggcctggtgcggtggctcacgcctgtaatcccagcactttgggaggccagggagggcggatcaggaggtcaggagttcgagaccagcctggccaatatggtgaaaccccatctctacttaaaatacaaaaattagccgggcgtggtggcacgtgcttgtagtcccagctactcgggaggctgaggcagaagaatcacttggaccccagaggcagagattgcagtgagccgagatcgtgccagtgcactccagcctgggcgatagagcaagactctgtctcaaaaaaaaaaaaaaaaaaaaagtgttggaattacaggcatgagcccctgtggccagccagtacattgcttgaggcttaatatgtagaccttatctattttctctttcctttcttcctaggaggactcatttaacatattttatataccaaattttattttattttattatttatttttgagacagagtctttctgtcgcccaggctagagtgcagtggcgtgatcttggctcactgcaacctctgcctcccgggttcaagcaattctctgcctcagcctcccaggtagctgggattacaggtgcctgccaccaagcctggctaattttttgtatttttagtagaggcggggtttcaccatcttggccaggctggtcttgaactcctgacgtcatgatccacccgcctcagcctcccaaagtgctgggattacaggcatgagccaccgcgcccggccttttatataccaaattttagagcagaaaggcactttagccataatgtagtcagcttcatttcgcagatgacttcatctttgacctctacatggataactacaatgcattcattcaacaaaaatcactgaaggcttccaagtaccagggattagtgccataaggaaatattagagaattttcaggttgatacaggacatgcacagaaataaccaaggtacaagactgatggtgaaggcctggtgtggtggctcacgcttgtgatcccagcactttgggaggccgaggcaggcagatcacctgaggtcaggagtttgagaccagcctggccaacatggtgaaaccctgtctctgttaaaaatacaaaaattagctgggtgtggtggcagatgcctttagtaccagctacttgggagactgaggcaggagaatcacttgaaccccaggaggcagaggttgcagttagctgagatcatgccattgcactccagcctgggcgacaagagcaaaacttcatctaaaaataataataataataataataataataataataaagactgactgtgaaaagtgcaagagggagggaataaacttagagaaacagaactttggtcatcaagagagagatcaggaaggaaggtggtggatggatagagcagggagggcttcatggaagaagtgatgtctggaatgtgccatctgtcagatttgactagaaaggacattctagaggcacaaggaggatctgaacaaaggcctggggaaaggaaagcaccgagtaacttcatggaagcccttcccacagtagttggttcaggatgaacccatgatatgaaaaatcttcagggggaatgcatgtgagggagcagggagcccaggagctgctgggtctgcccttaggatgatgctgtcagcacggtggctgagtggggccatggggcaagtgttgcctggagtctggctcctctggttttttttttttttttttttttcttgagacggagtcttgctctgtcacccaggctggagtggaatggcacaatctcatctcactgcaacctctgcctcctgggttcaagtgattcttgtgcctcaacctcccgagtagctgagactacaggtgtgtgccaccgtgcccagctaatttttgtatttttagtagagatggggttccaccatgttggtcaggctggtctcgaactcctgacctcaagtgatccgcccacctcagtctcccaaaatgctgggattacaggtgtgagccaccatgcccggctgtggttcctctgggttttcaagttgtgtcagctggtcagttactttacgttttccattaaaataaaaagcattctgaaattatatatatataatttatatatatgtaaaaattacataattttacatagtatttacgaacagcactagagagaacttagaaaattttaaaaggtggcttgattacaaattactacagaagatgaaacaaaatgaaacaaaacatagtcagcatagtaaattacaaaaaaacaaggggaacttcccaattaaaaagcaaatacttcccgaagagaaattaaaacacactgccgggtgcagtggctcacgcctgtaatcccagcactttgggaggccaaggcaggcagatcacctgaggtcgggagtttgagaccagcctgaccaacatggcgaaaccccgtctctactaaaaataaaaaatcagctgggcatgctggcgcatgcctgtaatcccagctactcaggaggctgaggcaggagaatcacttgaacccgggaggcagaggttacagtgagccaagatcacaccattgcactccagcctgggcaacaagaacaaaactctgtctaaaaaataaaaataaaaaaaaatacacccatacaaaaacttgtacacaaatgttcatggcaacattattcataatagtcaaaaagtggaaccaacccaagtgtccatcaactgaaatggatcaacaaaatatggcattatctatttaatggaatatttaacaattgaaaagcaatggagtattgatacatgctccaatagggatgaaccttgaggaagttatgcttagtgaaagaagccagtcacaaaagaccatatgttgtaccattctgtgtatataacatgtccaaatctagaaagacagaaagtagatgagcggttgcttagggaaggggaagcagatgagggagactggagagtgatgataaaggagtgtggatttctatttgggttaatgaaaatattttgaagtcgatggcagtgatggctgcacaactctgttaatacaccaaagccattgaatttgtactttattttctttgagacaaagtttcactttgttgcccaggctagagtgcagtggtgtgatcatggctcattgcagcctcaacctcctgggctcaagcaattctcccgcttcagccttcggagtagctgggactacaggtgccccgccaccgtgcctggctaattttttaaaaattatttgtagagatgaggtctccctatgttgcctaggttggtttccaactcctgggctcaagcaatcctcccaccttggcctcccaaagtgctgggattacagccatgagccacggtgcccagcctgaatttttacctaaatgagttcgttgtatggtatgtaaattattcttcaataaagctattataaaaatataagtggtctatacaggccaagtaaaaggctgaaaatgaccaagctgaaaaaaaatcggccgggcgcggtggctcacgcctgtaatcccagcactttgggaggccgaggcgggtggatcacgaggtcaggggatcgagaccatcctggctaacacagtgaaaccccgtctctactaaaaaatacaaaaaaattagccgggcatggtggcgggcgcctatagtcccagctacttaggaggctgaggcaggagaatggtgtgaacccaggaggcggagcttgcagtgagccgagataatgccgctgcactccagcctgggcaacagagcaagagagcgagactctgtctcaaaaaaaaagaaagaaagaaagaaagaaatcaagaccattatatgatgactacaaaaattaaacttcagatacaaaggcataggtagactaaaagtgaaaagatggagaaaaataagatagaccttgtgaaaccgataagaaagttggaaaggttatactgacattggaactgactttaatacaaggaatgttaccagagataaaaagcggcatttcacaatgataaagagtctgttcatgcacaaaacatagcaatcctaaacgtgtaaacacctaaaaacggtttgaaaatacgtgaaggaaaaattgaaacaactgatggggtgaaaaaaataaacccacaattagattagatttcaacactcatttactgataggataagtaggcagacactaaattataagagaacgattttcagcctctgtgttactgacatttttggccagataatttgtttgtttgtatttatttatttatttatttatttgagatggagtctcactctgtcacccaggctggtgtgcagtggcgctgcctcggctcactgcaacctctgcctcccgggttcaagtgattctcctgcctcagcctcctgagtagctgggactatatgtgagccaccacgcctggctaatttttgtatttttggtggagactgggtttcaccatgttggccgggctgttcttgaactcctgacctcaggagatccgcccacctcggcctcccgaagtgctgggattacaagcgtgagccaccatgcctggccaagtttttaattttacttgtaattgaccagctcagtctttgttgtggggggctgtcttgtgcattgtggtatgtttagcagcaggccaggtgtggtggctcacgcctgtaatcatagcactttgagaggccgaggagagcgaatcacttgagtccgggagtttgagaccagcccaggcaacatggtgaaacctcatctctacaaaaataaataaataaacaaacatatatatgaatgtttagcagtatccctggtctttatctgtatgagttacctagggctgccatatcaaagtactgcaaactgggtggctcaaaacaacagaaatttattctttcacagttctggggctagaagtctgagacaaaagtgttggcagggccacgctgtctccgaaccctctagggaagggtccttctatgcatcttccagcttctgggagccccaggtatccttggcttgtggcagactaactccaatctctacctctgtcctcaaatggctgttttcccctcgtgtgtctctgtatccaaatttatcctgcttcttataagaacatcaaattggattagggcccatcctatgaactcaccttgattatatctgtaaagaccctgtttccaaataaggtcacattcacaggtgatgggggttaaggttacaacattttttttttttttgacacagagtctctgtcacctaggcttgagtgcagtggcacgatcatggctcactgcagcctccaactcctgggttcaagccatcctcctgccttagcctcctgagtagctgggactacaggcacaaatcactgtggctggctaactttttaaatttttttgtagagatgggggtcttgcttgttgcccaggctggtcttgaaatcctagcctcaagcaattctcctgcctcagcttcccaaagtgctgagattacaagcatgagccaccatgcctggccagcttcagcatttccttttggaggatacaacccataacactacctaataggtgtcagggcatccctcctagttgtgaaaaacaaaaatgtctccagatattgccaaatgttccctggatggcaaaatcgccaccctcccattgagatttgaataacactatcaactaccttgatctcctttacacttataaaacattatacccaacaacaaaagaatacacattctggaaacacttattctattttatggaatgaagtgttgccaatttaaaaaaaaaaaaaaggagggtagcatggtggcgcacacctgtaatcccagcactttggaaggcagagggggaaggactgcctgagactgtgagttcaagaccagtgtggccaacataatgagactctgtctctaaaataaaatttaaaaacttagcggggcatggtagtgcactcctgtagtcccagctacttaggaggctgaggcccagggatctcttgagttcaggagggtgaggctgcagtgacccatgattgcaccactgcattccactccagcctgggtgacagagtgagaccatgtctcaaaaataaaataaaaacacataaataaataaataaatatttaaaaatataggccaggtgcagtggcttatgcctgtaatcccagcactttgggagtccgatgtgggtggaccacttgaggtcaggagttcaagaccagcttggccaacatggtgaaaccctgtctttactaaaaatacaaaaaaaaaaaaattagctgggcatggtggcatgtgcctgtaatcaccatattggccaggcttgtctcgaactcctgaacttgtggtccgcccacctcagcctcccaaagtgctgggatgacaggcgtgagccaccattcccggtcactatttggaaattaacatcattcttctaaataacccatgggccttttctgcctcaactgcttccagggcacctgtggaaaaagcttgtgatgaggtggggcaaaaaatagaagccagttctcaagttcacctttgattgtacccaccctacagaagatggaatcaatttacaaaaatttaccaaattacaaaaatttattaaaatgattttagtaaaattagatttaaattaatagaaattgcatttctatataccagcaatgaactcttggaaattgaaatttaaaaatagtatctctcatgttagaggcttgactaaaaaaaaaagaataaatatagtatcattcataatagcattataaatgaaatcctgagggataaatttcacaaaatatatgcaagattgtacaatgaaaactatgacattgctgagggaaatgaataagacttaaatgaagaaatatactgtattcatgggatgaaagactgagtgttgttaagatgtcaattattcccaaattgatctacagattcaatataatttcaggcaaaattcctactggtcttctgtagaaattgacaagctgattctaaaatgtttctggaaatacaaacaacctaaaatagtcaaaataattttgaaagaggacaaagttacagatcttgtatatctgattttaagatgtactataaagcaatggtaataaagggtagataaataacagtgcaaaagaagatactgcttagaaacaaaccaactcatatatggtcaattttttttttttttacaaacatgacaaggtactttaagtgaaaggatatcctcttcaacaaatggtgctggaacaagtgaatatccatatacaaacaaatgaacctaactcttgtctcacactagacacaaaaattaacttgaaaaagataatagacctgaatgcgagagcaaacactataaaacttctcgaagagcgggcgcagtggctcacgcctgtaatctcaagaaatttgggaggtcaaggtgggcggaacacgaggtcaagacattgagatcatcctggccaacatggtgaaaccccatctctactaaaaatacaaaaattagccaggcatggtggcgtgcgcctgtaatcccagctactcgggaggctggggcaagagaatcacttgaacctgggagacagaggttgtagtgagctgagatcgcaccactgcactccagcctggtgacagagcgagacttcgtctcaataaattaattaattaattaaattaaattaaattaaacttctagaagaaaccatataaaagaaaaatctgtattaggccaagatttcttagatatgaaaccagaagtactgtctattaaaaaattgataaattagattttcatcaaaattaaaaatgtctcctctttgaaagacactgtcaagaaaataaaaaagcaggccaggcacggtggctcatgcctgtaatcccagcactttgggaggctgaggcgggtggatcacttgaggtcaggagttcaagaccagcctggccaacatggtgaaaccccgtctctactaaaaatacaaaaattagccgggcatggtggtccgtgcctgtagtcccagcactagggaggctgaggcagcagagtcgcttgaacccgggtggcagaggttgcagtgagccaagatagtgccactgtactccagcctgggcgacagagccagactctgtctcaaaaaagaaaagaaaagaaaagagaagaggagaagaaaagaaaagagcaggccgggcgcggcggctcacgcctgtaatcccagcactttgggacgctgaggcgggaggatcatgaggtcaggagtttgagaccagcctggccaatatggtaaaaccccatctctactaaaaatacaaaaattagccaggcatggttgtgcatgcctgtaattccagctactggggaggctgacgcaggagaattgcttgaagtcgggaggcggaggttgcagtaagccaagattgtgccaccgcactccagcctgggcaacagagtgagactgtctcaaaaaacaaaacgaaacaagtaatggagcaaagcttctgttgctccacatcctcactggcatttggtatttgaggcataatcttaacacatcacaatcaaagccaacagccaacttccaagcaagtacataatacacaaagcagagctgtggacaatgtaattacaacacaactaaggttgaattaataaataaatattttataccatgtttgtacttgatagtgaaaacatcttcgtttcaacaatctgtggaacacttataaaaactgatattttaggtcacaaagaaaactttcatacattgcccaatgcggaaactgtaccataatgtaataaatgttgagataacgaaagttaaaacagcaacaaaaataaatagagactactaaacacttgtcaaagtcattattgctttggattaaagaggtttttttttttttttttgagatggagtctcgctctgttgctcaggttagagtgtaatggcgcgatctcagctcattgcaacctccgcctcccgggttcaagcgattctcctgcctcaacctcctgagtagctgggattacaggggcctgccaccacgcccggctaatttttgtatttttagtagagacagggtttcgccatgttggccaggctgttcttgaactcctgacctgatccatccgcctccgtctcccagagtgctgggattacaggcgtgagccaccgcgcccggccaaagaggaattttttgaatttaaagtctatatagaaaataaggaaaataagagcccattcaactacaaacccatagggtgaaatgatttcactgtcacatacacacacacacacaaaacaataaattttccgtattaagaggaaaaaaaggaaaagaattcccaaggaaaacagggaggcaataaagataaccggcgactgtgactgctggtgtactgtgtcctcccccagttaagcaaactatcattcatccacctgtatgtccggggaacaggctcaatcaactctgcgaagctttcccaaagtcaggctttctgtcctttgggcttctacagtaggctgttcatagcgctatgttagtatttattaaagttttgcaatcccaggaagtttttcacatcactctgccctttaaatacctttgtttaccacttagaatgtgccaggcaattggcattaattcaccgaatccttacaatttttttttttcgcggtgtgtgtgtgttgggggggggcggcgggggggtattcctaatttccagaaactgaatctcagaaaggttaactgagcaaggtcacagagcgaacgcatcacaaagtcaggatgtggtgcagatcggtccattttcaatacaagctctttctaccacgacaggttattttgcacttggggacagtttttaactttccattctcaactcctatcctagctcctggcacagaacatgtcatccaagttaggcatcatcgtcgcctgctcttggtgaagttttcttttgcgtactgcggagagatgcgctcattaccagctggcggtggagtcgctgaaacgcaaatggatttgagactgagcgactcccatctctatggttggtatgtgacccatctatcctctggaggactcagcaaggactaccagtcaccagacaactttacgcgcacgtggtcgcaaggtgaacttgctattggttaatggcagtaaagcccgcccatcagcgctggtctgctcctttaaaagaacgccatcgacgctcccctgtctttcagcgcctgcaggttccgggaggtcaggttgtattcctggcgggtcgtctggctgggtgggccccggaggtcgtggctcgggagcagggaggcgtaggggggccggcctgctgtgatgacattccaattaaagcacgtgttagactgctgacgcgggtgatgcgaactggagtctgagcctgcccgagcggagctgggagggggctggcgggcgggcgcgcgcacacccgctgatctatcactctcgttcttgtagctcccagccgaggacgtcggatgtcatcgtccttgctgctttgccaccccattcccgtcaataaagtggtttgaacccaaccctggtgtcggtgtgtgtcgttggcgacgcgctgtctttgagcccccgccgagcttcctcgtggcgccgggggtcaatctgcagcgctagagcatgtgcttgcgcataactggggccgcctggcctcccgcgggcggcctttttaaccgcgagcgacaagaagtaacctgactgtccggctgctaggctgggcaattttccagctgttttgccacgacaggcctcaatccgtaataccaaggctggaatggcgtgttaggggggcggtggctgacggggatacgcggactcttgatgcgtaaggagtgcccctctgctcccatacgttccccagcccagccttccctgagtgtatcgcgcgcgctgtgccttcgccgtgagttcgacataagtcccaggctgtcgcgtctgccatcagacgcgcagatttagttgaaggcagcgtggaatggcgtctgcagggctgttgtgtacttgacataaacagattcggtgtggaactgcattgagttaactcctgactaaagggtaatcgacctgtttacaaataaccatgcaggagtactgacaagcatgggactaaagctttgggcaggttaatctgtcactcctaaacagttcaaaattatagggcggttgtgaaggtgaattagattttatatatggttggggacaacatagacacctagttacacagtccagattcagtgattggtaaaagatcttccacaagggctccagtgaaaggtgcatcagttctgagtacagggcagcaatggtgggcaaggatgcacgtatgcgttcactacatggacattcgatgaatgaaggtgtcccgaattaacattatactagacaatgaagggtgtaaactgcagcccaggagcaccactgccctaccccctcagttacgaactttcactggattctttaaatgtgggctgaagataatggcacatagtttgaaggatgtagtgaggatggctttgtagccttaggactgggcagtgatcaacgcagtaaatgaaagctgcgattgccaggtgagggccccggtgctctgtactcattttattgtgcccctatctgaacaggattccgtagaaatgacttagatgcttatctagtatttgacattgagatatttattttgtgaaacaatgcaagcgattttaaatccccacatactatttgattaagtgcaacatggtacagtcatgtgtaatctctttacacgatagtgcatctagtccttagcctttagttattgcacaacaattataaagaccagtgaccaggacacgtggactctgacaggcagatcggcctacacaacgaaaaatcagaacagtacaccaactggaatggtcaaacaatttaagtcaaatgttttaatggtgcaattaaaataagggttcaaacatgttttcaatatattaatttctttaaagtcatgttcaggcaaggtgctgtttaaaaaaccactattagctttgtccacacatgtaagttatcaaaagttacccaaggtaattttgacgttgaatgcagctttaaacaataaaaaaatggtattaggtttacttctcgaagcaaagagagcccccaaccttgtaaactaaacattctgacacaaatgcacaaaattaagttggcaacattaattttgagatgtagtgtgatgctgagcaaacttttggtcttgactcttgaaataattaaagagagcagttctccgttttggccttcaggaagggaaatctgcccatggaactctcccaatcagattaacaaactgtttcgattcccatataaacctggaggacacaggaaacgccagatggaaaaactggctctggctttctaaccccatcccatctgtatgagaggacccatcctgtcatgtgcagtgtttgatgttttcacatacgctcctgtctcaggaaaacattcaagattagctagcccccaggtggttgtacctcattggtgaaaggcttgggatggtttgatctcatggctttgcctgatgttcacataaatcccactgtccttacccaagctgatagcgtgttgtgtgtgtactatggctacttgcttcccaaatgcacaatttaatgtggaaaataagttgctctgcccatctcttctgtcaccgaaatgaaaaggctcacagaattcctctccccaccctccagacacattgcacactgacattctctggaagtgtggaaggccgcatacaaagtatagaagtgaaaaagtccactgtgcaccggctgcctgaagaaaagctttggaggagtagaggaggcaagttgttcagctttgctcttactgtgctcatttgctgccacaaacatgggtagacttttaaaagccatggtgtgggtcacgtataacttctggatccaccatgattcttccatggtctcctttgccaaatcaaagctttgcagcaggcaatccagacagttgtcactagatgcagggaatgacacctcacagtggaatgggcactggcaggcagagggcagaagcagtcctttaagaaacagtagctgtggcacagaggccagtgctacagtacagatggcggccaagaaccccacacatccagctcgatgtcacaatatggggaacatctgacatcacccatcatggctgatcagcagcctccacaggtgggtctttcaggaggcaggaagtagagcgagggtccatggctgagtgcattatagtgatataaacatcatccatgtttggcatgacaaaaactttctgtaggaagatattaaagaacagctatgtggaagaatgccttgccaggctgtcaccctcctttgttctgataattttagggcttagactgatttttaaaagtacatataaaaacttgctatgcattccaaactaattctcccaccatacatactttagaaagagttgaggaatcataccagcgcatggatacgagaatcctctaatatatcagctcggaggcagaagtggcctttgattttgtatacatataataaggttgcccatatgcactgatatatatccaacaatttaagagaattggcttaagctgttcacagtagttcccagttactatgtctagaacacatattccatgtgaattatccttttattaataaatcctagcgataaaatgtaagctaatggccaggtgcgatggttcacgcctgtaatcccagtactttgggaggccaaggcaggcagatcatctgaggtccagagttcaagaccagcctggccaacatggtgaaaccctgtctcaactaaaaataccaaaaaattaggccaggcatggtagctcacacctgtaatcccagcactttgggaggccgaggtgggcagatcacgaggttaggagatcgagaccatcctggctaatacagtgaaacccccatctctactaaaaatacaaaaaattagctgggtgtggtggcgggtgcctgtagtcccagctactcgggaggctgaggcatgagaatggtgtgaacctgggggacggagtttgcagtgagccgagatggcgccattgcactccagcctgggcgacacagcaagactctgtcttaaaaaaaaaaaaaaaaaaaagaaagaaaaagggaaaaataaaaggcatgatgttctttcccctcagtaggttcaaagtacttttctatttggtgatgacattaagctttttcagaaattggttatcagttatgtttaatctctagtttttaaataagaggatttttttaaggcagtaactcaaaatataccactgcaaaaagaatgtaggtcttcttcaaaaggtgaatttcattaaaagtaaatagtttgctaatccataaaaccccgacagacaactgtgcttcaaatatctgataaaagtttgatggaaatagctcatcctagggcctcagctatactgctattacctttggtggccaaatgcagaaagaaaagctgagagagtaagctctggcttaatgaactcccagactacactagaagctacccaggggagggagaggccagattcatctttggactcccagggcaggtggtacctggcacacagaagggtttccaggaatgtttgttgaactgaacaaactgagcaaggtgaacagcacacaagaacagggggcagcctccctgcccacaggccgggtgctaagagttgggcaaggccaggccttgcataagagaaaacaaagcctgacagtcctggcaggcttgctgggaaaagacatcatcattttgctctgacccaaatcttttgggtttcctctgaagatgacttagtaatgttctgtggataagtttcagggctttgatactgtacctgaagttttattcccatatttgatcaaatgtaatactcttccgggatgaaggtcaccatcagattttcaaaagaggatcctgacccagctgaagttcagaacctcggctaaacccagagcttctatacttggtgtgaaatactagataacactagaggtttacctgaaactcttgctccagtttcttctctatccagtctgtcacatgaactaaagtcacttctctctctccaagttttggccgagctttcagctccacatgtggtggctttcggaaaccatacctttttgaagacaagtaataaccacatttagaagcaaagcaaggaatgagacaggcactgacagcaaacagttctcatttacatggggctttatcactacttaaaatgttattttcttctgaaaatgccctctaaaaatattccacacacaaagtatgaattgtgaaccccctgtgttccctggatggtgttagggctgtggcggatttagaacagttctgacaaactgagagagccaggaagcaccactggaaaagtccatgacctgggcattggtttctgtttttttctaaaatggcaataaccttttttctttcaatttttataaaagtagtatatgtacattacaaaaacaaaacatacatacaagcagataaagcagagagtgaaagacacactgcctctctctgaatgtcatccccaagagaggactattgacagaagtagggtgaactccccttacattctcctgtgcatatgtcgatcaataaggtttgaaacctgttttttcatcctacaccccaacaatacgctttgtatgacttcccgagggagcagactggcaatcagaactgttggcaaagtatccagacaagaccctgtatgctatcaactatctaaaaccttaaatctgtcctggaccagtgcttttggaaatacagtaaaaatgtcaagttgccataaatatttctaaacactctatacttatctttatggatcaataacacatagttcagcatttgagcatgccttgggtagcactatcctagagcccttttattttatctccccctgagcagaggcatttaaaactgataaatctaaagaattggcagtaaggagaagaaatgtatcaattttaactattaaaatttttttaaggtttgaaagaccatacaatatattaacagtggttatttctggatggtgagattatgggtttttatttatttatctatttttcaccttttcccaatctttctcttttttttaacaatgaaaatattactttaaaaaagtataaaaaggcattttaaagttttattgggaaataccagcattatcgttaaatggttagtcaattcaaaacccctcttctgatcattcctacaaatccttctgaataccgatggtatgtactagcatgttggttttactctatgatagaacagagctatatttttgttatgagtgtagtttatggtacaatgagatctcttatgcaatcactatttacacttatgcccatttttataggacttagcatgtcaattttaaattgagattcacaggcagtgatgctgaactcatcagtaatttatttcagtgactctcaaccctggcttcatcacccccgacccctgaaatccggggggatgggccaggcatagctatatttttagcaagtccccaggtgattttaacatgcagctggggctgagaatccagtcctcagacaccaaatgcacatgctcctgactcctcagcattgaggcctaactcagggaagtctccctaacttcccagactctgttggatgtgtgatccccatctttaaagtagggataacaatggcatctacctcaacaggatgctatgaggactaatcaggtaatgcaattacaaccagggccaggcagagaataaaggcgctatctacaaatgacagctgttattactggcagaacagttggctttacagaggaggaagaccaataatagaaacagcttatctcataaacttcatgtattgactttaacttttcctaccatgtgaacatgaattcttgaatgtgaattcaccactcacagaagaaagtaccatcagatttgcaactaatattaaggtcccatgaaaattgtttggaagtgcttctgcccgggagaaggtactttccataacctcaaggttaagcaggctgggatttctgtggccatgcaataggaggaatcacttattgtccctgagggccctctacgcaccatactcggtcagtcgggggtggtggaatgttgaccgccaaggttcctctacattcttgtacttcaacagtgagcagcaggggtgtgttggagacttcttcgatcttctttttaataaactctgtctctgttgctttttggaaatattttgacttggtaattttatcaacaaacctcataatcttacttgttcgatgacctccaacgtaccttcaaatgtggaacacaaagggcggttagcacaaactttgctcttttcacagacaaaaacctgtggctcttcgttccccttactttagagcaccactcgatgttttggatgtggtgattctgtgttggggcggggggcatcctgtgcattgcagggtgttcagcagcatccctggtctctacctaccagatgccaatagcactccccctagttatgacaataaaaaatgttgccagacatcggcaaatgtcctctggggggccaaatcacccccagttgagaactactacttcagagaaggtgtaaatgtctgaaacagtccaaaccttgacaatggagagctggacaaagtcctcatgcagaggtttctcacctgtcctcctttatactactccaataccagacagaaatccaatgacatatcaatctcataatctccatgcagcaagtaacaaatcatgctgcatcaataggacataaatcagtaattaatggactgtctttaggtggtgtcacatggctaccttgagtggcaattacttttcaaagggcttggaacttcttaaagaaaaatgtagcctgggcaacacagtgagacccccatctctacaaaaaacaaacagaaaattagccaggagtggtggtgtgcatctgtagtcccagctactcgggaggctaaaatgggaggatcacttgagcccaggaggttgaggctgcattgagctatgatcgtgccactgcactccaggcctgggtgacagagcaagatgctgtctcaagaaaacaaacaaacaaacaaaatgctacaccaagttgacgtgctcacaggccaagaaaataagctgttgtatcaggtcacatgtaccatgagactcagaagaaaggatatttgctttttaaaatcccccacagttccagaacatgaggaaaagtatgtgttcagggaaaagcaatcattcttaagagggtcaagcagctagactgtaaataatacacacaaactttggcaccaactcctcaaacatctgaattctcatctcctgtaggatttcaaaagtgaataggttggttttttcttataaaagtttctgaattatttggcttcttttagtttcttcaattcactttatgtaattaaaagatcattgtggataggctatttaagcactttgatcatttcacagcccaagttaacagggaaagagtaaccccctccaaatgaagttcatgatccaaaagatcagctcagtcatcagcgctttcaaaactcgccaaagaaaatcatctgaatgtttctgctttgcaggaacttgcagctcaacagaagcaaatgcactccagctgaagctgaggggagggaggctctccggggggagggggtgtatgctcggttccttctgaaggctcagggagatgcttttcatcatcagcacacccttcaacttctctattatttaatcaaacagcagcagaaagccattttagtaaggaaagctatatgggtctttttgcttggttgcctggaatttaaacagaccactgacctgggatattaataaaaaaaccatctactcaacattaaagaggaaggaagatcacagaggaaggaagggaaacaaggttcactcccaacttgctgtcctgatccctggagactcagaggcacagaagcactgatccactcacccttcagcccctgggaggagctgtttgtctcccccgctgggctctggggcatcgtcttcctcggaggagccagcgctggaggattcctcatcgctgtccgccagacagaatgcccggggcctgcaactggacagagagagagtcaccaccactgcctgccctcacccaagctctgcttagaaagagaacacacacacccatgcacacacactcaaccacaacagggtcgggatgtaactgttaactacatctcgtcattctctccaacccacccaaaccagaagaggcccaatccaagaatccttggatcagcgcagatgctcaggacactcttcagcaccaaggcctctgacaggaccacagaggccttggacccagaagaggttgcttttgagcatgcgtcagaaggacaggaggtgggagtgtgatgcgcacataaaatgcagtgatttcaaccagcagtgcagcggagccacacgggaggatgaacagaaagagcggatggttgcaagagtgaggtgacagcttatactggtgacatggccacttctcactgatgatgggatgttgaggcaagtcccttggctctggcttaattcagcaactctgatgctttctggcttagtaaccctccaagtgagttttgactcatgactcctttccagtgaaattacgtatttcactccacacctgccctatctcctgagggtcacagaaaaagccaacaaccacatacacacacacacacaaaaagtctcaggagactctaggaagcaactgacatgagaacccaggaaattttccggaaaaatacatgtctaaagaccattcctttgactgaagtaagggaaagcctcatgggacagcagtgtccctcactcagctctccagggcagatactcagttccagaggtgtggggttgctggattacccgcagaggtgaggggtccagttcccgtcggaggggacctgggggcttctgggctgagcctcgggcctatagaaagcagcttcctccctggaccgtggctttgcttcagaaagtactggcagggctgtgtctgagcccagagacttaaatgggacaaaatgaacaagggacagagtagtctctgaacactattacacaaccaaatggtcaccaagcagaggctggtcattgtatttttgacaaggacacagttacatggacaagggaaggcagtggggctcagggcctatctccctgcagctgcagtcctttggttttcctgatgctgtccttgggccaccagaggcccacggggacagttatcgcctgaccaacaggagccaaaggcacccaagggcacagcacacatgccagtgtggaactgaaggcccggcagtggccccagccctgtgcactgggagggtaggactgaaacctctacactggaaacaggagccggctgtaagaggacccggactgtgtcctccctggcaggacacacagctcctccctacccccactctgaaacattagagccagtgctccagccaacaggctggacttccacattaaagggaaactccctctgcagaaacaaaagcctcttgtccctggccatgggacagcacgtaactgagtcttcctccttccaccagaggcctggctggtccaggaaatgcttatgtgtatccactggctgcagagccatatcagagtgtgctgtggttaggcagccctcacaggaatcttatatttaaaatgtatatagcaaaattcaattcctatgaaagcctaaaccgggtcttgggtgaggaaagtcagagatgtaaatccccaaagatcacacgcccctctcagaagagcatcagagttctccatcagtaggatggcagtgcctgaggctctctgacctcatgctgccaggtgtgaaatctgtccccacagcacagggagcctgctcctcacccacaaagcacaaaaggctgcctgcaagctctgggaccccagtgagatctgctgagccactgctccttgtgtccccactgggccatatcatctggcagctccaaccctgggcagaagatgccagaggctgagcgctgtggcaagctctcaggttactgagttaatcctctgcaggtcacagaacaggacaaattttgtggcttgaagtgaacactttaggtaatgctgtaccagttcaagctgatcagatgatgtgaaaatctgattttgaccgagtggtacctctgctctccgcgctgggggcagtattatgcggcacccaatacttaggaattataagtgtagcccagtgtttgcctgatattcatttttataaatgaacatgcattttatgacctcagcatgaacttcagaggaagatacaccacacttacttgtagaagacgtgctggaatgtaattagcctacttgttttaaacacacctcagaattccagatgagtgtggtatcctttcaaagagacaccttaaaaggcttattccagttatgttccttctgccaaaaatcttttggaaatgtcagatatataagaaaaagtgaattattttatcactgacactcttagaccaaatattttatttcttggtctcataatgaccaccacctctgatgacttctagcaatttctcaaaggtccaaaccatctacaaagcaggacaatttgctgtcactcaggatagctaaaagaatgtcacggactgtggaggcaattctaaaaagaagcccccaaaatgctttaaatgaagacgcataattaaattaagaagccctgtgagatgtttgctttgagggagaccacactcaagaatgcactaatttttcttttgagaaaatcagttctatacacctgccacaggcacacatgtgcatacacacccacaaactagactgagtcacagtgtaaactgcaggcactcagtgcccagaacaccaggggcctgggggcagatgggtagtttggggtagatgtgaactagtaacccaaaagaggtcagatggggccaccttctgacttggggacttgtacaaagggcccagactgcagtggtggagcaggaagaggccaagtgccttataggaaacacttcacttccatgccactttccatttaaaggccacccaaaaggcagagcgctccctttaactaactcattctggccctctgcagggcagttcctaaagcagaggctgctcaggttactatctcaatcccatctgaatgttgtatgttatgttacctgcagtgtgcgacaaaaggactatttgggaaaagactaaaggaaaaatgcccatgaaaatacagcagacacatatttcaaagggaagagactttgctagggcaaagctacacaggttaaaatctcagtctaaccctcagggtgctaactaaaggtgaacaaacttcctaccagtaaggaggacatctcacaggttaagcagcatctcctcagagactccgcaaaagcacaatcatttgcacacttgaacagggactgagaaaagcagtgagatgaagccgaggccctgccaggcaggacaccagggagcagaccctgatgtggagtgaagccctggacaggtggccatgggctgcagggagagcctgcaggaaagggctgctgctggccaattcttcagatgttccgtgctttggaggtttaatattaaggaagatgtcagttccaaaggtcacacgcttcaaacagctaataagtatgctgacccctgtccctcctctgctactaagccgcgtggtgattccgtaaacctcatgactgaggaagtgaagtggattctggaatcacttctgggattaggttcttaaccacggatgggctttcagagattcacaatgctcctagaaactgtgagccaaatggtgcatgtggaagcatttgcagaaagaaggacccagtgctctcaggttcccgaaagggtcctttctgaaaaaaggggtaagggtccatttttctgggcctttttctcccaaatgaagtgctgctggattgtattcctccttacttttaaaaacaaatgatagccaactacacatcaacatataatttaacaccctcacaggaagaagcaaaacattttataacagactgttctagaaaaaaatagtactttagaaatataagtgaaatataataccatcacattcctaaagcagaggatctttttttcactcagtctagagaagcacagctttccagaaacacgtccaccctctgatcggccagagtttatgaacttgaaactgggctacgagggctgcatgaatagcagtgaatgtggacgcatacgtggcaagcacctcagggaccggcctggttgccacccccggtgcccaagaccccctttgcaatggagtccctgtgcccctgtgcccacatggtgctgtttctagaaagggctccttgcacaaacgcatctgcctgaggttgctctgccacactccctttttattagatctcattttcaagactgcttctgcttcaggtgcttcattttctaggcagctggttctgcaactctgtcgtcatgagctagatttaatgtgctcagctatgcgtgggggtggggtggggacagcaggacaaggaattgagtctgactagatcaggactccagcaattcaaattggggaagtctataagactttccctgtcaggaaagcctcttaactactcctggtgtcggttctctcaggcttttatgtccaagaacgtgatgcctttatgtccaagaacgtgatgaaaagacaggtttcctcatggtttcacatgggaccgaacaagactcagaagttacagggtatgaaatgctatgtggagagttgataaataccacactcaccagaaaatataaatccacagattgccgaatccaaacatattttaacaaatagaaaaatgaaaggaaaatagcacagacaccggttagattgcatatagctggtaaaattctccaattattaaaatagaaacatttcattaagtaacttgaataaatcagaataatctaagtaaaagaatattctccaatgcataacccagctcccccaatctgctactaccacaagcatgaataaaagcattaggtcagtaccagaaccaagcaaaagtctaagagccagtatcttatatttagaccccatggaggtagctccttgtgacattttcatgtcatcatactgttgattccatgcaaagggctaaagatgtgagaagtagcctctagtcaacatttttaatttggtaaaaacaataatataatttaaatttatagtcaaagcagtaattttaaggagaataggatgtaaaagttccagtttatctattctaggcatttaagagggaaaaaaattaagcttcatgagttacctcacaattttggaatatttactaaatcagacaaaccctaggcagcagatacactatctacaaagagagggatttactacgcaagtcaatattgtattatttagggaaaatgcttctcaaaacacttttaggagcaccctctgtgctacaaaatcaatcatctaattataaataattctgactttgtgattaaagcaggtagattcagcctgctccacatattgctgtttatgaccggaaggatcttcatgattctattcgaggatcattttattgctcggatgagtctgccctgcttgtctgagtcagtgatgttttctgggtaatcaattccatgtgtaccaccaccagcactgaggtcaaaggcgctgtcacagctgagctgggttgggaactcacaggccactggggatgagactaggaaaccattccctgaaatgctctggtccaggagcacttacacagaagctcactcaacatccaggggccactacacatcaaatctgcttctcaaaggctggagggagaagctggtgccccaggattggattagtaaattcatatatagccccttacccttctttgccaatttctccaaccttcagggcttcaacaagaggctctttacctagtttggtcaaattcattttggtctcgagagtcatcagaaaggacccattgtaggacatttccaaatcaatccagagtcctggagaaatggtgaaaaaacagaaggtttttttccctcaaaaaaacacatgactataaatgacttacatttaaaaatatctaaataggcaccatactgaaagtccatgtatcgtctactactctagttgagaagaggactgagagcacattgtgccatcgacacacacgagaacaggtcatggaatacatcgagcccctggtaaacagccagcatctgaggacccattcacaggatcctggggaattcagtgcacaagtcagcattggaagggtcccatcctctggcttctaaaatctccttgtatttagtaagaagacatatgcctagcggaagaaaatggcttgacccagggcaaagccaggacaaggcatgctgatgcccagccagttacgaggcacaagggaagtgctaagacttctctgtaagctgggttgttctttaaagacacatatgagaaccgctgtctttcttaaaattctccagtattgggagtgggacacagaaaatggctcagatttaacaggaagagtgacaaaaacgtttaagaccttcctttctttctggaaactgcccactgatgggaaccaaagaattaactttcaattcccaggattatccagatacaattgcataatcactttgtaccttaggctaaaaatcagctccttaggaaagatactatgccaatgagatcatatctaaaaggcttgtagcttcatggaattttactgcaatggccgctgttcagtggtttaaaatgcaaacagggtttatctcatgaccctcttctacttgaggattctatgatttgtcaagtatttttctgtgatttttcagactcggggctccagaagacctcatggactttctatcaaaatgtgatcctttaagtgggtgtttaaatgttaataaacttttatagatcctcacatgacaaatgacatctaaaaggaagcaggaaattaatctaaaaccatcgttcacatacagcattgttttcaagcaattacagtaaacagcccatcccctacacggccaccacctcagataaaaccactgcttaaccccacccagcactaatggtgtcattcctcactaaaggcaggatgatttccattttgttttcaacaaattctttttaccataatggaaggtaattattttccatgaatgacctggtttaattaagtgatatggagatcaattgtgattatcttctttgcagcaatactcacaaaactgttgtatttcttgtttacattaagcagttagaaagaattaattagcttgctcttcaaaggtactattactggaaataaagggtatatctgctttaataaagacatttagtttttaatcacttcaggagaaaggggattagagcaaaaggctaatattaatagatttaaactcaatgtaaaagaacaacaataaaggagatatttattgttgtatagtatttccagctttgaaaattaatattcaaactacctagttactatatacatccaaacataatcgtttcttttgaaaattctagtcaagtttctaataaatattaatagtatgcgttgcctttgaaaatggacatattaaaggcaccagaattatacttcttacaaaatggaaagttttgctagtctgttttttaaatgaagatatatggatttaggcttagtaaactgctggctcatgcccagtcacggggacattctaccaaatgatgtgtggtccagcgtccctgccaggagctgggaggtggaggaaggcccagggaagagcaaggagcccagtcacatagattggggcttgtgtttcactggaagtttcttcacttctgtgccatcagtacctttgtctgcaccaaggagacctatactgcctctttcagggagagctgtgtacaccctggcacctggcacagtctgaccaggcagcctccctttttctgcattcaccagcccacccttacttcttgctctgtctcccttgctgctgttgccagggaagaggctgtactggtcagccatggagcctgatatctgaggatgaggcttgggcatctgactgagcctctgcctgggtgaggggtctgttttaaacactgaatatacctcatgagacccactcacagggccctgctcagccctggcactcataaaaatatgaaagagtcaagaatgctttaagaacttttttcttccctgagatggggtctcactctcacccaggctggagtgccacctggtacgatcttggctgactgcaacctccgcctcccaggctcaagtgatcctcccaccacagcctcctgagtagctgggaccacaggggtccgccaccatgcccggctaacatatatatatattttatttttggtagagatggggttttgccatattgcccagggtgatttcaaactcctgagctcaagtgatccacctgccttggcctcccaaagtgctgggattactttgggaggtgtgagccactgcacctggcctggaatggtttaagaacttttaaaagcagacatgaatggtaaataaatattccaacaaatgactctaatatgatgtgcttgcattcagatgagggtaagaagactattttagcattaagtgtaggagaaatttgcttttgtaacaatgattcagcaggcagaacgtgacctgaaaacctggggacacgggcaactcccaaaacttggagcaaagaccaaccggttacgtgacaggtgagtcaggaggcccctgccttgcaagactgaaagatgaaattcacagttactagaaaggttgtcttccccttggggactaacatagcaacaatgagcacacggggacatacactgccccatgagcaccatcttccactgtaacccagctaaatgctacttaatctagaggaatgcggttacagggccctttcttttgtagtcttgacaaatggttaagacttagctgtaggcatttcactgaaaatactttctataaccatgtgccctggctggtgctcaagaacaaaaccagaaattgaggagtgggataatctttgatgcctttaaataggagtaagcaggcagtcctgagaggttctctgggaaagggggctggaggcacgcatacgaagggtctattccacatcatgttgagaggttgtccagtggtaaccagtggcacccgattattaacgagcccctataaaactggcacttcaggctgggcacagtgtctcacgcctgtaatcccagcactttgggaggctgaggcaggcggatcacttgaggccaggagttcaagaccagcctggccatcatggtgaaacctcgtctctactaaaaatacacaaattagctaggcatggtggtgcgcacctgtagtcccagctgctaggtacgctgaggcacgagaatggcttgagcctggggggcagaggttgcagtgagccgcgatcgccctactgcactctagcctctgtctcaaaagaagaagaagaaaaaaaaaaaaaaccctggcacttcatgcagcaacacgagtgacaatgtagtaagacttagtctgtgtacaaggacctggaaggagctcagatgctgtttttccactcttcagtttcacagcggcaggatcaattaccactaccaccactacacagagacactgtggcaaaaattacagcttattccaccaaaaagcgtgtatgcgttcttaatgtacaatatcagagccaaaagcactgagatgaacccctgccctcaggaagtgtatgtttgaagaaaaataaaagtggcctaggccagctgctgcagctcagaccatgatgccagttggtatcataaaatgccttggcgtatgtccccacagataaggggtggccacaaccacaagaggctcttctgccttcggcctggttttccagttaacagaccccatggcctcagtcctcccgtggccatgtgaatctaataatctcacacagcagttcactgttttattactatttaggcatctgtctcactggagtaggcttgagagggcacctgctgcttgggagtagttaagggaaccaaaaccctgcacacctgaacttggtcctcacgttattttctcctccatttccttctacctgtaactattaacagctgatttcactctgaaagtcaatatttggcatccaaagaacaaaacttcttaaaatggaacatttgataacattatcaagaacagatgttggagttattcagctctgggaagaacacaccagtgactgttgtgctcctggcaaagagactggtgccatattgctcattcagatactacagaaaattagcaattccttgtgtgtggatgtgtctttgatgatagacatcatttttagccttatctacctgtaactgtcctctgaaatagagctccaccccttcaaggttgacaagctgcaaatcagggtcccctgtcccccacccgacccatgttccacaagaggtatgatttccccttcccacactaagccctttccacactaagtgtttttcttcccgtagcacagtctggtcagagccactcctatcagccccacgtgctagagtatggccctgccttggtgctcaggcccaggcagccccagtggctgtagctgccctctgatgtcactcttgaagcacgtgtggcaggaggagtgggcaagtcatgactgactctggctccagttttctgtcattactcaggtggcaaagtagcatcactcccaacactggatgtgaaggcaccaggcacacaggtagtggatcctggtaggatccagtctggaacactggatgtgaaggcaccaggcacgtgggttaaggtctggaatatcagtccagatgactaagggcagctctggagacagacaaggtttctatttctgtgggacatggtaatatttccatagaatctgagacattcagtctaaatttgggctgttatttggtatcttgaaaacaaggcaaaacccagtcgggtcctctgtctgtgtggacactcagtggctatttgcagttttaaattcatgttgcaaacatcccgaagactaaatgaattcatctaagcctgaggggttgtggtctgcatccttggatcattctgacgctgctgacacacctgtgggcacctgttctgaaaccgctggactcaggcacagaagataaaaacctgctgacagaagcggcccccacccagcctcttcaggatgattttattaatactaacacagtggccggagagcagcagctaacactgatgcttactacgtgccacgtgctccgagtgctttacacgtaacactgcatctctaccacacccaaacgaggcgggcaggactgccatcagcacttgaaggatgaggaaactgaggtatagagtggttagtggcttccccacagttgtaccgctgaatggtgtacgagcaggacccaaacacaggtgacctggctgtagagccagtgctcatgggcagcctctgatggggcctagactccatgaaacaggttggaagtgtgaggctgctgctgacccgggcaagtcacccctctctgggctttggctcatacacacatggcagggtggattgaggcaatctgactgccctttcaagtcttcccagttcttcaagggttttgaaaaagagctatgttttctaaatttttagccataagaaaaaagatttggagagcatataccaaaaatgtactaaaaaggtaaccctggttatctctgaatggtgggatgatgggtaatattttcctttttacctttcctgaatatttctgtttttcccacaatgagtatttgttgaatgaatgaacaaacattaccctaatggagttaataaaatgactggaaagagtttggctgagtggcaggccctggaggtggcagcccagggtagggatgagggctgggtagaggaggccagtctggtgggggaagggtaacatacacaggtttctggaccttgctgtgtggcctaaaggaaagaaaggaaatccatatatatcccacaggtagagcagctagttccagggtgtgtgtggagtgaggaggcgtcagagctgaggcaggaggagcacagccagtttctaagggacacagcttgcctatcgtccagccatctgcctttggtgggaagtgaggctgctctggaaaaggtggtcatttaacctcattcaattcacttgagacaggttgtgtgtgttggaacagggacaagccaacatggccattgtgtgcgatttcattcagaagaaccacagacttgacttcttacagcagcaaggccatgaaagctgagaatgccattttgttttgttttgttttgtttttgtttatcctagtaggatctgccagctttgatctgtaggatggtcaactggacactatggccgcctccatgctaaatgccctaacagcagcatccaggcagccatgataataacaatccttagttgacatgcatagagctcctccttgctccagatgctgttctagtgccttttttgtattgactcatttaatcctcacgacaagcttatgaagtaggtgctgtaagaatccctgtttgagctgggcgcagtggctcatgcatgtaatcccagcactttgagaggctgaggtgggtggatcacctgaggtcaggagttcaagaccagactggccaacagggagaaaccccctctctactaaaaatataaaaattagccagtcatggtggcaggtgcctgtaatcccagctacttgggaggctgagacaggagaatcacttgaacccaggaggtggaggttgcagtgagttgagatcatgccactgcactccaggctggacgacaagagtgaaactccatctcaaaaaaaaaagaatccctatttgagagatgaggaagtgaagtggttcaggggtttgcctgaggccacgaagctgtggaccaggtagtcgggtccagagctggtgctcaaaaccagtgctgcctcttgcctcaagaagagcatccctaggatgggataatccaaccagttgtggccaaaatatcccttctgaacatattcctccaacaaacaagcacaagccaggaaatatttttaaaaagaatgtgaggggatcccataggaggtggcgctccttagagctgtgaaggcctccttcacctgggtcgcatttccctggaaggtgagctctgcttttcagagtcagtttgcttgtcacccagattcaaatttcactaaaaggaaagattcccccgtagagcactggaatccaaaatgcttatttatttctttcacggtcatttctgttttatcatcatacatgcatcatttgtggacttggaaaaacctgatttgatcaaactttgaaaaccccactggctttatgtctttatcgttcctttaataccattttctcccttgttacacaagcaggcaagtctctaaaaacgtaccctgaaaggagttaaatagcctcaaatggattaaaaactggcaaagctttgatctatatagtgaaatatctcaccatagctcctgctctagaagaacagttaagaagcttgacacttaggtgtttggtgaattttactcaaagcctgaccaaagctgccctgagaggctgcagagttcaaagccacaggggcctggttgtggccctgctcccctctcctcggaaatttctacaaattcagcaaagggcagtcctgagataagaggctgcttacacattagaaaatagagcgtgcacacttattatttagtttctttaagcctcacatgaggtttgtgttagctgatcattcaccagcttcttatacatttctaaagaggcaaagagcaaaaaggaatagagaggccacctgagttagaggaagaaaggtagcagctgtacactgatggagtgaagatgctagctagctatgcagtgaacacatagatggtgctttttttttttttttttgagacagattctcgctctgttgcccaggcctcagactcccgagtagctgggattacaggccagggtgatgctagggcccgaggttacatcttcatcttatttctaaagctctgttattttctttctttcttttttttaagacagagtctcgctctgtcgcccaggctggagtgcagaggcacagtcttggctcattgcaacctctgcctcctgggttcaagctattcttgtgcctcagcctactgagtcactgggattacaggcacacaccaccatgcccggctgacttttgtatttttagtagagacggggtttcaccacgttggccaggctggtcttgaactcctggtctcaagtgatctacctgccttggcctttaaaagtgctaggattacaggcgtgagccaccgcactcagccaatgcatcttttacaattttgcatggggttaaaaacactctagttcagccatttgccaagaattgaaaggttttctacttttactttcagtgaaccagaaattcccaaacctagacacacccagattcatcaaggtatagacataattgaggggttacaggtgagctcaacatgcaggaattagatggacttctctggatgtgcaaatactaccctggtctttctttctctgaaattgatgtgatgcgaaaaacatggatgggttgtccactgaaatattgctggagagatatgctagagctgctaactatagtgctagaaaaatctcttcatatttacatcaaatgtacacaacagcagaaaaactgatttcactaaacacaattcaagaaccatctgatacagccagagagaaaagtagcttccatgctctacaaattttataaaacatttactttaaaacaactatcactctcttgaaaagctataattagtttttctcctaccttgttcctaagccattttaggaaaaatgtaaatatggttgaagtggaaagaggctcacttgccaagggaggctacagtaaaaacgtcagtgagaattctctctgcatgctaatgggctattctggcctacctggctcattcctctttttttaccaaactcctgtgtactaaattttccctgtcaagatccttttaaaaccgtatttatggtttatgtgacataagagatacaaatccttacatcatcatcatcatcatgttacacaaactctctacaatctgatcaactctttaaccccccacccacaaaagcagacataaataatgtcttagtaacatgtttaaaaactcaaatctgagaactttcctccagcaaggagccctactctcaaaatattgcctttgaatatactgtacgtcttcatttctcaaacatgtactgagcacctactaggagtagcaaggaacataaagacagaagacatgaaagtcaaaaaatctggaacctacaagtcaggagaggtaaggatgtgaacacatgtgaggagaggcagctcctggcaagcggctagggctggggcagctgcacccgtgagggccatgagaggtgagcggaactgaaatccagccactgcctcatgccctggcaagggctgcaacccctacaaaagcacaggccccatcagctggcatgtgtgcatcactgggctggaggaggccctataataaccaagagactaaaagacttaggatgggagcttggatctattccaaatctttttttttttttttttttttttttgtgagacagagtctcgctcttgtcatccaggctggagtccagtggcacgatcttggctcactgcaacctccgtctcctgggttcaagcgattctcctgcctcagcctcctgagtagctgggattacaggcacccgccaccacgcccgactaatttttgtacttttttagtagagacggtgttttgccatgttggccaggctggcctcgaattcctgacctcaggtgatccgcctgccttggcctcccaaaatgctgggattacaggcgtaagccaccatgcccggccccaaatcagttttaaggccatgactggtaagaacagaaagacactcaacatgaaacagatgatttaaaaagtcctcaacaccctccaaacacaaagccatcatggtactgaatctgcagcaaaggatatattttaacactcatagaatggtcagttaggagttaccttggtgatcaacgtaaggcttgaaggcctggaggatttttggcacagccacgcccatgtcaagttccgtcagagtgagctcattcataaagtaggggagctagaggaaacaagcaaacaatgagtgagacccatgagcaacctacaaaacatgctgttgcaagtcaacatgcttccggagaggatggtggccaaggttttggggacatatcatttatgtaacgaaaacgtaatgtgcacacatcatgtactaggcttcgtactccagacagagccatgaagaggtcaggccagggcctggctctcacggggtttataatagaaaggcagaaacaggtaaatacatagacaatatacttccagagagtgattagtgctgcaaagaacatcaagcaggtaatgggcagagggaacacgggggtggctgttttggctgaggaggtcagggatggcttccctgaggagtggcatttgagcagaggccacctatggagaaggagccagccatgctggttaacagtaccccacatttgctgaagtatgggaaaacagacctctctcagactctcagtgggtagtaagaaactgctacaacaaggtcaggtgcggtggctcatgtctgtaatcccaacactttgggaggccaaggtggatggatcacttgaggtcaggagttcgagaccagcctggccaacatggtgaaaccccaactctaccaaaaaatacaaaaatccaccaggcaaggtggcatgcacttgtagtcccagctactcggagaggctgaggtgggaggatcacttgaacctgggggcagaggttgcggtgagctgagaatgtgccactgcaccccagcctggaggacagagcgagactctgcgtcaaaaaaaaaaaaaaaagaaaagaagagaaattgctacatttccgataggcaaacttacatgtgtatgaaaatccttgaaaaacagcacatgctggccaggcgcagtggctcacgcctgtaatcccagcactttgggaggccgaggtgggcggatcacgaggtcaagagattgagaccatcctggctaacacggtgaaacccgtctctactaaatatacaaaaaattagccgggtgtggtggcacgtgcctgtagtcccagctactcaggaggctgaggcaggagaattgcttgaacctgagaggtggaggttgcagcaagccaagatcgcaccactgcactccagcctgggtgacagagcgagaatccgtctcaaaaaaaaaaaaaagaaaaatagcacatcctttgatctcatgctgaacattttctgtttgccctgccagatctacactctatccccagtggttggtctgcgtgaactgtgccaacggtctcttttaccctccagcttctggttgggcatggccaatgggatacaccaatgggcagttgatggggaggcacacggagaagagtgttgggcatttgtcccccccatctactgaaggccacagctcctgtaacacaggaagcctctccacacagctgccctgtccaagttctccttgcctttgctgctccagagagagtaacagctcccacttctgctagttctggagtgtagcactctccctacgagtttttctccatctgcccacacctttataaatcttcccttcagcaaactctccccagagttacttatctgagtgtgccatctgcttcctgctgggaccctgactaatacacacccccaaatctatccgtaggaatttattctacaggaaataacataagaatactggcatcatgtttaaaaattcctacttcatctcaagattatagaattaattcatctatattttctctgcttggatttgtggatgtatatgtatttcttaaaatatttattccattcataattttaatgtaagatgtaaattagggatctagtgtaatttttcccccaaatggttggtcagcaatctcgacctatttattcagcaaccaacacttgccctactaatctgttccgccatctttaagtgctaaattcccactgcactggagtctgtactgaatttctaccagtatcaaactgctttgactactttagctttataatatattttagctttataatacacttttaactttataatatacttttaaatctggcaagtccctctcctttttttttctcccagaattctcttagttattttcataagtatttttccagttgaatgttacaatagttttataaaatttagaataaaattaagaggtttttaaaaattaaatgtaaactaaatattccacataaaatgaggtagcatctagtcaggcatgaatttaatacctaacttggctggacctcttcagctgtttccctgcagagaaacataagctttcaggattcaccaatcagagaatgtaatctctgattttttgtggaggggatgttaaaaaggttataatgtctatgacgaacaaaacgtgagtagacagtgttcaaaggcatagttttgaattggtgtttgctatatttggagaacctttttccaaagcatcaatgttataagtggtattggcctctctaccaacctataaaatgctacttggctaagaatgtaaccaaagtcttgcacaattgccctgtcctttttgtccactactgtcattcaaatgctgtgcttcaggagcatgccaagttagagagacttccaagggtgagccagggaatactgtcacctccaatggtgtttcttttctttttttttttgaaacaggatttcgctctgtcactcaggctggagtgcagtggtgcaatcatggctcactgaagccacagcctcctggggtgaagcgatcctcccacctcaaccttctgagtagctgggactataggcatgtaccactaccacgcttggataattttttttttttgtagagacagggtcttactatgttgcctagtctggtctcaaactactgggctcaagatttcctccacttcggcctcccgaagtgctggattacaggcataagccaccatgcccagacatccaacggtgtttctatgggaatgtcagtctgacactgagccacaggagtgaataaagagacagcaggaacataactgtcccttctcttcccctgtcaaccactacctgccattctgcaacctctagtccctgcaaaggcaaaggaaggacctgagacaggacctgagacaaaggagggacctgaaggacctggggactgaggaggacttggcaggggaaggtgtctacctactagtaagcagaatggggaggggagatcagagggcctggtttcctatttatttgcccatctatccaacccgaagaccccagaacatctataaccaaccctccagcactcatatactcccctcctagttcacatccctgcccttgagcagccttcttctgttaaggtcattcctcctgttcttttcgacaataaactgttttcttcccacccaaagggtaccacagtgagacagaaatccaggggcacattctttaccctctggagtaaacccaattagggactaggcattcaagggtatgggacgttctcaggctggtgggtgctaagttagaagctgtatgcgatctcagcaacatttgctgacacaggcacaagaggctcataaccactgagggccctagggcggttatctgagcagctggctaaggccaagagcacacttactactggggcagaaactcagcttgttttaaacccatcactgggcaccagttgcacacacagggctgctttttcacaacatgagtcatgatcatgtgcaaggctgacaatccgagactacagggcaaggccagcaaagagttctccatatgtcaggccttccagggaaaccaggggatcagggagatctgtgtcacaggggaaagctcaggctcctctagataccacttccctattcccattttggctcttgactggctattaaccaatacccactcactactaggcttaaggcttagttcctcccaggggtacttggatatttggtggcaatcagttcttttcgtaggggcggtgacagcttcagaatttggtaatgtccttctgctttcctgtttattctgtaaccaggggctcctctggtctgcaggcacttcacagtgcagcagatcaggaggcgggtggagggtatggatggaacacactgagggaacacaatgcccacctctagcctctggcactgctggatctaggccacacttctccattctaaccttttagtacttctgacctcaaaaaacaaaaggaagtttaagtctgtgaactaccagtgcctccatgattatcaacgggagaaaatgaaaacagactttccctcaactttctccaggaggacgggggcaccttcacaaatagggcagaggctctgtggacttccagctcaagagagaagggtgggacctctcaaaccagtttggttttgttggtgttgttgttgtttttagagatgagagtcttgctctgtcacccaggctggagtttggtggtgcgatcatagctcagaactcctgggttcaagtcatcctcttgcctctgcaacccaagtatctgggaccacaggtgtgcaccagcactcctggctcaagtcagctttggaatgcatgtagcaggggagcagcatcccacctggagttcaagtatgtcctgctttctttttgcacactgccaagaactgcagccctgctgctcagggaagggcccctcttgcttacagaagggctcgagatagaccctgggaaaagagcagggccagccctacccatatgccttgacctgggaactcaagccttccatcatttccaaaaatggggagaggctgagtgagctctaggttggctgctgacactgcatctcccaacacagagggttactgctacttgttgtctcctgctatggaactggctagcagaagcacgttcaaccctcaaactacctcaggaacacaaacaggctgacacctgtcaacagagccctcccccaaaatctgccttgaaatccacccttctggctcagaaggcagcccctccttcctctttctcaggagctggggaagaagggacactggcccacagacagcagccagagcttgacaaggccaggaaaagctctgttctttacccaaaggaacaaaagaaatcaacctgaagctcctctatgcccatattttccttctaatctagtttaccgtagttcacagtttcttaatctagagtccttgaactttctgaaataatgggcaaaattttgtgtcaacgtgtttttctagtgaaaggatatcataggcttctgcttctcaaaaatgtctctgatccatacaacttcagggctactgacttaagctactgactgttcagtgaaaatttgggatccaaagtgactcttcttggctgggtcttcactgggtcaaaaagttaattttaaagaacctcaagatcctcaataaggtctcctggttggcaaatgagtcttttaatgacagccatacttacacagttcaaactcacttccaactggccctggattagcaccagagtgtttcttcaggagagagcccaaaataaagtaccatctggccaaaaagtaaaggtcaaacacagacacatttaaagtgcaatgctaactttcccagcttgagagggagcacagcctgggaaagaggccttaagtagtctggtgttttcctcagtcagtatactaagaggccttaagtagtctagcattttcttcagtgagtatactaagaggccttaagtaatttgtattttcctcagaggatataccatgtggcctagactgctgtggggctgggtgggctctggatgtacaatttaagttcatttccaacttaaaaataacaattatataagacgaatcggttataagagctcacattttcccaaactaaattctggattatcacctggagtggataacaatgagggcaacacaagaaaatgagtaaacattaatgttcactaagcccccagatgcaattaatcataaggtcagtctgtgatcaaggtcagatgtgctgtttgagaacttactaccctcatatgttatacgtttaaaccaaattatttttcacttaggacataagggtacaaaatttccagaaatgaagaagtatagaggattagaagcctcttgtgtggaaagtgatacctttattttgctgagtttcatttggatcttcttagacaccagatcagaccagtatttctctcctaagaagtcccaaaatattcttccaagcaaggcattcacccaggcttcctgttcttcctcctcagagggtggaacctctggcaactggcaaaagaaaagggaccaaaattagctagaaagcaactggagaataagacaggtgcttatttttataaagtcactgaaggtccctccttatagaaacaggagaccacacgagtcatactccttccctataaattacaagtcccacattgtattggtgactaggaaaggggagaaacgaaagctgccatcacagctaaaaccttctctttgtctgttttctttttctaccagtcttcctgtaaaccagctaatatttcatactattagcttagccaaactgctctgcgtccaaattagcttggtatcaacattatgcatcagtgacacatctgataaaatgcctgcccatctttcttcaagctaaggcttggacgtgtaattgtcaagctggtgctcatccgggcagacgccacagttccccaatggccaggactcaagttcagcctgaaccctgtgaggtcaaaatattcccgggatgcttaaaaatactgatgcctggatcctacccccagagtcactgatttcagtgggcatcaggagtttcagatgctcccctggtaatgtaatgaacaggcaagacgatgaatcacagatctggattagagagagctgctctcagggcttccatgaaacatctacagctgttctcaccaatctcggcccagcgaaataccctgatccttacttccatttgatacaatccatctgaagcatctgctgtggccaatgtgtgaggtgggggagaaagtaaacccaagtctccgatttccttggctaatcattagactgtgcactctggcctggagggggtcagggatggagataaagaagggtaaacagcagcacccacagacggtgttgtaaggtttatgtggttggtgcaggcacgggctgagagctcagtaatgtagcagctgtccactgaccacatgccagccctatgggcacattcctgtctcaggtccactcatgtctcacaataccctggaaagacaggaactttacttccattttagaaatgagtgcagcgcctgacacacagtcctgttctcccatcctctatctgctctgtcctgtgtgtggcggtgggggtgggggaaggggagctggccccctgatatggcagacattttcctgtgctgaggtctctaattagactgtagccttgcagaaacaatgagctttggaaagcaaagatgaaaagatttagaaatgcagaatctgtgaattattccccctttcccctccctctatggctactataagtgcatctgttctgccctcatgggctggctgcagctataacacacaccagacactctcatcacctccacgctttgtgcttgtgcattcgtgccagtgctatccattctgagcagctgtgactgtgcccacattgaagctgtgtgcctgggtcagtgctgtggtgcacacgttgttgcttggtgtgtatggatttgaatctgcagatccaattgtttgtgagtactcccaaggtctacagcacatagctccgtgcactcattctgaagcttggtgttcaccagtcactgagctgtgcctgagccagcacactgctcagtcccacccgtctgccagtcttgctgagaggtgaggccagctagacttcctgggtggagtggggacttggagaaattttcttacaagaggattgtaaaatgcaccaatcagcactctgtaaaaatgtaccaatcagcactctgtagctagcaaaaggattgtaaaatgcaccaatcagtgccctataaaacgcaccaatcagcgctctgtaaaatgtaccaatcagcactctgtaaaatgcaccaatcagcaggatcctaaaagtagccaatcgcagagaggattgaaaaaagggcattgtgataggacaaaaacagaacatgggaagggacaataagggaataaaagctggccaccctagccagcagcagcggcaacctgcttgggtgcccttacacagtgtggaagctttgtacttttgctcttcacaataaaccttcctactactcactctttgggtccgtgccacctttaagagctgtaacactcaccatgaaggtccgagacttcattcttgaagtcagtgagaccacgaacccaccagcaggaaccaactccacatacattgccacagcctgtgccctctcttgctgggggcctagggttcgcttacgtttttcaatcacatgtcactgcatgactttatattttacaggagtccttcacatttgagttttcaaaggtctcctttatgaacgttggtgagtctcatttaaaaaaaaaaatggtttaaaaaagaaagcatgctggtcagcccatttcagaagacatggatctgcttcacccttcttaatggacatggattattctctctgggcttttcgagtgctgtgacgttttctgtcattaaccaagacattttccaccactaggtcctggatggaagggcaagagtctgcagcggtgaatgcttggccatgccataacttgcactgtttttttgaatcccttttttctctgactgaacatctccttcccagccccaagggtaattcattcagcttttctgaggttactgtctttgagtcccatccgattatttatacagacttctgcataaacactcatccaagggcaatgaccacctggcccctcagacagtactaagttgctgcccacgtaagacaccacgtgtcttattttagatttgtaggttatacaagagaataagttactttttcccttccctagagggagcatctaccctttattagcctttctttacaaccctagttactcacaggaaacagttttagcacaaaatagcaagaaacaaaggctatttcacaatgtatgtccaagccaatggcatatgatgtggtaaacaaatttctgaaataaccgacaagcaggttgttttttcaacagttcctttttccaaaataagcttctctccacagactcattgggaacaaagaaaaattccagagcagaacatcgataatgcatcaaagaagcttttatgagcaaaacctggattcaacagcctgctaggaaggcccaacgaatgtcataaaaatttaagagtttaaagaaacaatgtgcatacatttcctaatattgccatttggctataggatgaaatgtgtggaggatattcatttcgctgtctcaactgtataaacacactaagaaatggtaactttccaaaaatggcttccaaataagtgtagagaaaattcaatggtttgaagctgaagcaagcccatcaaaactgcgtcactcttgggatatgtgttatttaaaactaacctctaaaactaaagtaggacagatttactgaagtctgtggtgtaacatttcctattacaaatggccaggaggccagcccagtttttctattacaaagagtgtgtagtgcccccactcctttttggccgcacccagtgtaccgccaggggggttgcacaagggacagtgtggtccaggagatgacacagcggaggaccctactcctgtgtgtttctttcccttgattataaaaacaatgcatattcactgcagaaaacacccataaacctgctactcagatttaaaacattttaaacattatttaaaacagttttactatattttctttcagtctcttttcagtgtatatatacatttaagaatacagaacttttaaaaagcaaaattaggccgggcgtggtggttcatgcctgtaatcccagcactttgggaggccaaggcgggcaaatcacgcagtcaagagattgagacaatcttggccaacatggtgaagtcccgtctctaccaaaaatacaaaaattagctgggtgtggtggtgcgtgcctatagtcccagctactcaggaggctgaggcaggagaatcgcttgagcccaggaggcagaggttgcagtgggccgagaccgtgccactgtactccaccctggccacagagcaaggctatctcaaaaaaaaaaaaaaaaaaaaaaaaaagcaaaattagatctggctacatggttttgtattctttgagaaggagtctcgctctgtcgcccaggctggagtgcagtggcgcgatctcgactcactgcaaactccgcctcccaggttcaagggaggctacctcagcctcccaagtagctggtattacaggcattcaccaccacgcctggctaattttttgtatttttagtacagacggggcttctccatggtagtcaggctggtctcaaactcccaacctcaggtgatctgcctgcctcggcctcccaaagtgctgagattacaggtgtgagccaccatgcccggctggttttgtatttttttttttttttacagttttacttagatataattcatagatcatacaatttttccatccttccatagctgctgtggaaaacagtattgcggttccttaaacaatttaaacagaattacccttaagatgcactaatttcacttctggctatataccccaacaaatttgaaagcagggtctcaaaacaagatatgtgtacactgatgttcagagcagcatcattcacaatagctaaaatgtggaagcaagccaagcacccaccgatggaggaatggataagcaaaatggcgtacgtacacaatggagcatgattcagcctcaaaaaggaaggcgattctgacttacgctaccacatggatgaatcttgaggtcattaggctaagtgaaataagtcagtcacaaaaagacaaatactgtataattctacttatatgaggtacttaggatagtcaaaatccgagagacagggaatggtggttgccaggggctgggaggagggggacaggggagttactgtttaatgagtatagagtttcaattatacaagttgaagagaatggtgggggtcaatgcataacattatgaatgtattcaattctactgaactatacattttaaaatgattaagatggcaaactttatgtattttaccacaaaaataatttttaaaaatagagtacattcaatagttttcagtatattgagagttgtgtagctatcaccacagtcaattttagaacattttcgtcactccccaaataaaccctgtacccattagcagtcactccctattcctccccaactcctccccatccccctgcccaccagtctaggaaactagtttgtctctatgaatttgcctattccagacatttcctataaatgaagtcatacaatgtgttcttttgtgactgactcccctcactaatgttttcaaggcatatccatgttgtagcagtgcgtcctttttattgcataataaacttatttttattgcataataatattatcatctatgcatataccacactttatccactcaccagttaatggaaatatgggttgtttgccacttttgttgtgttttttttttttttaaaacagagtcttgctgtgtcatccaggctggagtgcagtggtgtgatctcggctcactgcaacctatgcctcctgagttcaagccattcttgtgcctcagcctcccgagtagctgggactacaggcgtgcactactacgcccggctaatttttgtctttttagtagagatggggtttcgccatattggccaggctggtcttgaactcctggcctcaagtaatccacccacctcagccttccgaactgctgggcttacaggcgcaagccactgtgccccaccattttccacttttggctattgtgaataatgctactataaatatttgtgtacaagtgtttgtgtaaacatgtattttcatttctcttggatatatatttaggagtggaactgctggctcatatggtgactctgtttaactttttgaggaaataccaaactatttcccacagtggctggactattttacattcctgccagcaacgtatgaggactccaatttctttctttctttcttttttgaggcagagtctcactctgttgtccaggctggagtgaagcggcatgattttggctccctgtaacctctgcctcccaggttcaagtgattctcgtgcctcagcctccccagtagctgggattacaggcatgcgccaccatgcctggctaattttttgtatttttaatagagatgggattttgccatgttgcccaggctggcctcaaactcctgagctcaggcagtccacccgcctcggcctcccaaagtgttaggattataggcgtgagccaccgcacccggccaaggattccaatttctctacatcctcactaatacttgttatcatctatctttttaaaaatttttattatttatttatttatttggtagagatggagttttgtcatcttgcccaggctggtctcgaactcctgagctcaagtgatccattcgcctcagtctcccaaagtgttgggattacaagtgtgagccaccactgtgcctggccaccatctgtctttttcattgtggccatctgggtgggtgtgaagtgacatctgactgtggttttgattcacatttccttgatgactaatgatactgagcatcttttcatgtgcttgcttatttgggcgttagtgtatcttctttggagaaatgtctattcagatcctttacccttttattttttgagacagggtcttgctctgttgctcaggttgaagtgcagtggtgcaatcactaatcactgcagctctgacctccctgactcgagcaattctgattcagccttctgagtagctgggactgcaggcacatgccactatgtctggctaattttttttttcttcttttttgtagagatggagtctcaatatgttgcccaggctggcctcaaactcctgagctcaagtgatcctcctgccttggcctcccaaagtgctcagattataggcgtgagccactgcacccagccccgttgcttaatctggttatttatctctttgttattgagttgtaagagtcctttatacatttctaggtaccagtcctttatatttctaggtaccagaaccttatcagataaatgattcgtaaacattttctcccatcctgtgggttatcttttcactgtcttgatggtattgttggcagcacaaaagtttctaattttgatgaagtccaatttacctatcttttctttggttgcttatgcttttagtatcttagctaagaaggtttatcgaacccaaagtcacaaattttactcctgagagttttatggttttagctcttacattgaggtctatgatccattttgagttaatttttatgtatggtgtgaggtagagggccagctccattctcttgcccatagatatccagttgttcccgcacctttgttgaagagactattctttctctccactgatttgttttagcactcttgtctgaattctttttaaaatttatttttaaattggatatatagcttcattttttaacttagtgcaacaaaaacattttccaattcaacttctaagtgtttaaaaagcctactttgtgggggtagcaagggaagccctggaaaactattctgccagttacagacttcctggtttctatttgactcctatttgctctgtaacattctcatcttctgataacaccaaacaggtaataatatcttgtaatccagtttatagatatgagatgatgagcacgacgagtagtaataaggacaggactctccataccggggtggcatatgttaatattatctctaacattttttaaaactgtctgttgaaatggagagtggaagtgccttatgcaacctgaacaccagagcctcactactggaggacaggaaccatggcctctctcccaggcaggcaatgcagggcacacagaaccagcagcctccctggactcacacccctgagcaaatctgcagctgacctgtggagtctctcttcctgatgtacccatgctggaagtggtaccattgcactttcagacattttttaaaaaagagttcccttgtttcctgaattaaatccccttccaaaccaggcactaaacatttggaaaactaggcccttgccccccaaaatagtgatattttctaattcaaattttcagcaccactgcactccagtctgggcgacagagtgagactccaactaaaaaaagaaaaaaaaaatttcatcagaggccaggcacagtggctcacgctgtaattccaccactttgggaggccgaggagagtggatcaccagaggtcaggagttcaagaccagcctggccaacattgtgaaactccgtctctactaaaaatacaaaattagccggacgtggtagcgtgtgactgcagtcctggctactcaggaggctgaggcagaagaattgcttgaacctgggaggcggagatggcagtgagccaagatcacgccattgcactccagcctggggaaaaagagcaaaactccatctcaaaaaaaaaagtcatcagacttagaagagggaaaagaaatgtctgggtgcttaaagggtaagtgccaggtggctggaacaagagagcccctgacagcaatgctgggctgtgacatcagggaccccagtgaacatagcatacaatatgcacatgtaacacaaaccaaggaaacaaagctctaaaatcaggtttgttttttaatttggggaaatctttcaaaaggaagcattttattggataattttcttaacgtcagtgcacaattctcctcttgattttcttgagtctgatgagagtccagacagctgacagcctcgcatttggagggaggggaaactcaccagtggtaaacaggaccatttgtagaaaagttttatatcaccccactcttgcctagagggaggtctgcttcccactaaagctggggtgactcagtgcagaggtagtgggtcgcaggccagcagaggcatatggtcttttattgccctgacaaattcaaacagatcaggtgagtgacctcttccacactgaagaggatcaacggatcaagagcaatggcttgcttctcattaagaacagaaatacacatggtcattgtaagaggtcaaacacagccaagggcggtggctcacgcctgtaatctcagcactttgggaggccgaggcaggtgcatctcttgagctcaggagttcaagaccagactgggcaacatggtgaaaccccatctctacaaaaaatacaaaaattagctgggcatggtggcacacacctgtagctccagctacttgggaggctgagcccaggagggtgagaggatcacttgagcccaggaggtcgaggttgcaatgagccatgttcacgacactgcactccagcctgggtgacactgcgagaccttgtctcaaaaaaaaagaggtcaaacacctggatatgaaagagaggttaagtgtcccccaggcagagactgtgactctgaagagtgtgcaaagtagaggcaggaggcctcaggccaagcaggctttcagaataacccagcaaaatagtctcagcgagccaaggggcccctgggttctcaggtgaggtttgcacactccatcacttagcaactgtgtgactaggctacctaacttcatcaagcctcagtttctccgcttacaaaatggagacaatcctgtctagtttgcaggactgttcaagagagcagagtaattctattaaagtgcctaacagagcctggcatctggcagcttacaggagttatcttatcagagatgatcctaagtccgtgtccggttacactttgtaaagaatgttcatggtaaatcttcaaaagcactgggcatagccgaggagactgagaatttgaaaatacaatggttttggaggaatgagacctgaatcaccagtgattctgcaacaacccctagtgatcatccagttgctcaggtcaaagtgcaaatcttggcctctgcgttctctcacgtcagcaaatccagccagcgcctcctgccaagcacaccccagccgagcctctcctcaccacctactgtcactaccttcacattgatccagccttcactatgacagtcacctcccactccttttttccctctacagccagttctccaccaagagccacttatctttttatacttagatcagtcaacatcataccctgctcaaaaccctcccatggcctcccatcctgatcctccagcctccctacctccccatttcccttgctcactgtccggccaggcctccttgctgttcctcgaatattccaagcacatgcctacagcgggcccttgggttgctgcttttcccacctggagtgctcctcccacacccatcaccatggctcactcccccgtgaccaacaggtctgtgcccaaaagtcacctcctcaaagaggcccttcctgaccacccatccaaaatagcagagaaaaacagtacaaactttttaaaattaaaaataaataaatacataaataaataaaatagcagttctggccacttcccctcctcccttgtctgactttattttcattcttcccaccacctggtgcttgtttcttgctgtcttcctgagtagattacaagttccccaaaggcagggtccttctctgtcttgtgtaccactgttatcccagtgcccacaacagggcttcggagcacttacgcatgaagaaatgtgtctaagtcgaaaagtgaaaaaggtccggcccagcagccagctttaccttcttcccagctgtggggctgctctccgcactctgcagggggctcctctgggggcttcggctttcctgggggacacacctgcccatgtacacgctgtagtcgagaagcatcttctgccgcacgctgcctgccagctccttctgctttggctgtgacatgatctcctccacactgcctttgctgctgctgcggctgtgggtcaggtgcccggacggactgttgtgtctgctgtgtgcaggcaaaagccctggagccaagaagacgggggctattcacacaatgaagaaaacaactgcaaagtaagcggactccctgagaaaagcagctacaatgctatcaaatgactgtttaaaaatatttataaggggctgggcatggtggctcacgcctgtaatcccagcactttgagaggccgaggcgggcggatcacgaggtcaggagatcgagaccatcctggctaacacagtgaaaccccatctctactaaaaatacaaaaaattagccgggcgtggtggtgggcgccggtagtctcagctactcgggaggctgaggcaggagaatggtgtgaacccaggaggtggagcttgcagtgagccaagatcatgccactgcactccagtctgggcaacagagcgagactccatctcaaaaaaaaaaaaaaaaattttataagtttatttcccaccctgaaaagtacctttttctctaaggtaatttttaagaacggtttttattcctctccaagataattagagtaatggaagtaaagaaatatagttggtaggtactattctcttttctcctgatgatcttttaggaaaaggtcaaatataggaccaacacatcccaagtagtggcgaacttgtcagtgctatcaggggtaaatggaaagtgggtagagagctaattaattgttcatccacaagctcacagcaattccaaagatgtctttcattcgacaaattatgcatcaagcactttcaagcacaccatgctaaaaagaagacataatccctgcccttgaactcacgcacctaagcagataaatcacaatcttctgtaacaagtgtcaaaattgtagcacaactaagggactctctgggcaaaaagaagggggtgactacctctgcccaagagactggagcggtgcttaccctagctgactttcacagcagtgacatctacgctgtatcttgagggaatagttgccattttcctggcccaggtggggaagagtattccaggtacaggaagcagcatatgcaaaaagcagtgacagggcacagtatgtttggaggccagtgagagattcagtgaagttctaagcatagtacggggggcagaggataggaaatgaggatggagagattagccaggaacagactgcaaagtgcctcaaaagccaacctcgaatttaatattgaccctgttgcgccagaggttttaagcatgggatgcgcctgatgctaacaattttatttagatttactctgatggccaggtgaaacgtaaagtggttaaaatcaaaccaggctgggcgcggtggctcacgcctataatctcggcactttgggaggccgagacagatgaatcacttcaggtcaggagttcgagaccagcctggccgacatgatgaaaccccatctctactaaaaatacaaaacattagcctggcatggtggcctgtacctgtagtcctagctactgggggaggctgaaggcaggataatcgcttcaacctgggaggcggaggttgcagtgagccaagatcataccactgcactccagcttgggcaacagagcaagactctgtctcaaaaaaaaaaaaaagaaagaaagaaagaaagaaatcaaaaaatcaaatcaaaccattttcttcttaagaggctccaaccatcagaaccataattccccagagcctcacaaagggtcacgcaagccatttcttaatttaaattttagccagataatttccagcactttaatattttacactgcataactataaaaatacatttttgtaacttttattatccttataccgttttcatgtttagcatttttttaattgctaggataaaagctacatcaaaaacattaaaaaatagatgtaaactaatattacatttaatatcctggattggatcctggaagagaaaaaggacattagtagaaaaaccagtgaaatccaaataaagattacagtttagttaatagtaaaaaagagaaaaaaagatgaaataaacagggcagcatgataccaacacttcaaaccaaactgatcccattgtgactgagccacactccatgtagaggaggaaaggaaccccctacgaggcctggctggtgctcattgcccacagaacagcctcttcacatcacctcacccttcccctgagtgggacaaagcacaggagtcgtcactgcactgtgggtctcatggacaatagcccctgataaagtcaaggaccttcctgtgcagagaccatactggaattctgccaaatgaccatgtggctttcctgctgtctccagattcttattcctccgggaggcctttcctgacctgcagcctgggcactgctggctggaaatgcagaatctcagccccacccatgacctcgagtcagaacctgcatcttaagatcccgtcaaacattcaagtctgagaagcacaatccgtgttgctagagaaatctatgattttggtgacagcatccctgagggagaggacagggcaggtcgtcgagcaggaagacttctaacttcttggtactgatagatgtacctggcctcagagaatcagaccagtcctaccttcacggctgaccacctatgtagtcactgattcagagatggttttgaagaacagcacagtgctcaccaatttaccttgctactagtttaatcacacttttggtggcttaaacttaccataaatatctcaattcatagctttcaaaggcaacccagacttacagatgtacgaagacattagtggtgtgtgagccttgctttagtaccagtgagtgcactgaaggttttcccacatctctgactcttaccattatgtttgttgtgtgctgagtggaacttttggcaggatttccaaaaattgaactcgttaaaaataatcaaatgctttatttaagtccatgaataacatgcctcttttgaaggtgctctggggggcccctaagtacctaaggtggtgtttcctggtggccccatatacccccgtgggttacctgattctgagcttcagtgcctagaccagtagacctttatatttccagtaggaatacaatctgagccacataaacaattttaaattttctagtagtcacatttaaaaatgtaaaaagaggtcgggcacagtggctcacgcctgtaatcccagcactttgggaggccaaggtgggcggttcacttgaggctgggagtttaagatcagcctgaccaacatagtgaaatcctgtccctactaaagatataaaaaattagctgggcgtgatggcgggtgcctgtaatcccagctactcaggaggctgaggcaggagaactgcttgaacctgggaggcggaggttgcagtgagccaagatcgtgtcactgcactccagcctgggcaacaaagctagactccatctcaaaaaaaaaaaaaaaaaaaaaaaaaagaaagaaagaaaaagaaaggtaaaaagaatacaattaatttgaatatatttttaacccaatatatctaaaatattatttcaacatgtaaccaatataagaagttattaatgagatattttacattcttttattggactaagactttgaaatccaatgtgcatcttatacttagagcacacctccatctggactggccacacttcaagtgttcaaaagccacatggggctggtggctaccgtaagaagcagcacaggtttagacctaccaggagagctaggcagtgcctggtgctgaggagttcttacccacttgaattttcttttactcagtgttatgggttgaattgtgtcctccaaaaaatatgttaaagtcctaaccccagtatctcagaatgtgaccttatttggaaacagagtcattgtagatgccattcattaaaataaagtcatactagaaacagggtgggctcctaatcccatatgactggtgtccttccaagaagacacagagccactgacagacaatgccatgtgatgataggccagtgtggagtgatgcggctgcgggccaagtattgatggtcaccaccagaagctgcaaacacgcaaggaaggattctatgcagagtctcacaaggagcatggccctgctaacaccttgatttcagacttccagcctccagtactgtgagagaatacatttctgttgtaaatcacccagcttgtggtattttgtcccagcagccctaggaaataaatatatctagtaatctccccattcgtcttgattcttaaaagggacttcttagatctcagtgctgggattaggatggaatctggtgttgaagctgacagaatggaaggttagcaaaggagttagggcaaaggctcagattatgttccaggggaaggaaccaaagcactctgaagcaatgtgtgacactcatgtgaccagcataactcccggatcaacacaaatgccttgttagagaaagccccagagtggctccctcctagtctttgtttcagatccatgtaagaaagctttccctaataacacccacactggtcttgtcccaattatttgttacaccacactcattttagcatggcaatttgtgaacacctgactcatacgtgccagttttgcataacaggcacaacacctgaaggacaggggagctactgctttttactggttttgtgtctcttgcagctccaagcccagccaaagctgagcaaagaggtgctgcatggttatcaatccgaatgaccacgatctgacctgaatggtcaggaagtgcaaggattctgcattctatggcaagctcaggctcggaagacatattgagggtcaggtgctcgaaagtaccagcctgaaggatctccctgactcacctgccatctcagaaccagggtttttctgttgctgcttctctcaggggagtcacattatatacaaataaaacataaccagcaaaggctaataaacatcatctgcaaatggatccatcattggttaaatgatttgggacagacggctgcagtgatcagcctagatggtaaatgagtcatgagaatgcacattaggtggcagacaaccatcagttcagggtgggcttccttccttccttccttcctacctggcattctttctctattctccctagtggccctttaaaaatgcataagcatttagcacaaacatcattacctggtttacctccagagacacccgatgacttcttgatttccgactttagcttagatgccagaataaatctcctaaaccattcctctttttctcggccagttctcccaaagagatagagtatctgatctcgctggctagatcttgttccctcctgagggcggggtggcttcttagggtcctcacttccctcagctggcggcttctcttctgaagtctccttatcagtctgagctttagacataaagtcatcttgctgaccaagctcgatacaaatggggtactttttattccagattcgctttcgagccaaagttttaggtacaagataaatctacagagaaagaaaaatgatgatttatatattaaagattggctacactatgcattaatattatgcatagcacaaagtgcaaaccttatagactttttgactaaaatgatgaatatgaaataactttcaacacttgttcataacatgactacagaaactggaattttcagaagtgtcttgttattcttcaaaatcattccacaaagtaggcatttaataattttgcgagagttataaatatccgtaattttcaggtggcagtagcacaataataatgtttagctgcttatcatcaactatgtttggctatcaactgaatttaatgaccttggaccaaacttaagttggaagaaaaaaaaagatagctaaaatctagatgggaagctaaagtcaaccttgagtatcaaactcaagttaagaataaacttatataaaaactattttaagtacttctctcacattggagaaatctaaagatcattcagatgaactgtaagaacagagaaacaatagctttgtggaatacataatttacatttctcacaaaaatagaagtatataatacttaatcaaaatgtagttattttgcatatctatcatttgcacatgtacaaagacttcaatagttaagtaccgcagaatcaccacacatagccacacagctttttgtttgactgaaataattagcttttaaaggcagaattctgagtgcacaacacttgttcctcaagttgtggtctgtggaccagcagcctgagtatcatctgggagctcataaaaatgcaggcccgaggccctgcccacagctactgaatcagaatctgcatttaacaagatgcccaggtgatgtgcataaactttaaagtgtgagaggtactgtcccctaaggtatactgttcaacgaccacaaacctttttagggtataaaaaaatgcagttaagcatccaagatgccatatgcttttcattcatctaagctatccttccaaaattgctcaggctcaccttgctgtctgagaggtcatagattttctggctgatgtaggtgacctctggcttgggttcattgtagctggccctcctggatatatttttattgggctttgaaagtcttaaggttccaccctcaagtcgaacaaagactgaatgtgtcaaagtcgcatggtaggtttctggatcatagttgtaaatctcattcatccatccctgatgaagaaaaacttccattagtaatatcagaataatcgcaaatctgatttagtgtgaaatgatgaacactgtggtatttgggacactgaaaccaaacttgatcacgacacagatatcagctcaccaatgactacaggttgcaaagagaagtgcttagctgggaggataactggaactgaggaggtttttgataaccaaaaatctggatttggaggaaaaatggcaatgttcattatcctaaataaaaggttctttctttttttaaagcttataagcacatcaggaaactcagaagatttgttcatgtgactgagcaagcctctctgcctgacctcctttggggtgattaatcccacccagtctggccttcttaattagctaaacacatgctcttcccagcccagttggaatctttgaaatttcaggtattaattcatgttatcacaggactcagagaactacctctccacttctgttgcactacaatatgtacctcattgaaaccatgcagtaaagcagatgattgagaattaggcattaaatacatcgtaaatataatcaataatatatcaaaattcaaagatacatagtaacttaaatgggtaaaattgtgctccaggtccccctgccaaattggacataaatgattttgtgttacatatcttgattttttaaaagagccaacactgaaatgtatgacaaaaaatacatacacaaaagcctaatacactatacactgtgttaaagctaatctcatagctgtcatcatcattcatcactgaacacttctcctgcctcaaatactttttcaggttatgagtagcccagatctcacaaaagaagtcctctggggagttttaattgatatcttcctactctccccaactttttaaaaatacatgtctttgtaatgagcagagagatgctaaagctcactacatgggagttgggactgtcattcttttcaagcaatagccatttccatgctaagtatttgagtctcacactaaagtcttgaattgaaagcctatgagaatgaggactcctcagaattctttcattcatccttttattaaaacacgcattgaatctatgtgcgaagcaatgggttaggagttgggacaaagattttttaaaaggacaggattcttgatccaaaggtgcctccaaaagagtagagaattaggtcttcattcccgtatcctatgaccccactgtagtaaacataatagagacaagttgtcacaaacagagcacctaagtgtgaagtggaaggaaaaatggacaaacatatctctttgtcatgggggaaagagtgtgaaacttatgagccaattatatggatttatatacctcagtagatgttttggcctgagctgggaggttctctccctcctcccaaagaatgaccggacaggagcagcatctattcaacaatattgagtgagcaagcagtggccatgggaagaggcgtttgtgaggaaacagcaacaatcagagcaatgaagagaaaaagatgacaattacagatcacagtggggcctgaagtggactgtattgtcagagcatccgtttgggtgggtgtatttttgctaaatgtagaactaagtactttctttggctcacagtttttttgtctttttctttagtctgttcttatggcaaattacattcattgactttcaaatgttgaaccagtcttgcattctcaggattaaggatgtatgagtcatgatgtgctgaaattgggctgtatcagctcacaagaacggattctacacatctcttcctaactccatgttcagtgacttcacgttggtagctttcaactggcaacagtgggagttgctacatcacggaaatcagggaatagtcaaatcaagattttttttttttttttttttttttggagagccagtttaccagcataacactttgctgatattttgttcatttgtccctctaagttcatgaaggaaaatggtctatagttttcttgcagtgttttttggtattaatgagcctcagaaaatgcaggtaagtgcatttgggaagtgttccctcttctctattttctggaagtttgtgtagaattaataatatttcttccttaaaggtttgatagcatttgcccatgaagctatctgggcctagatttttccttgcagaaaggtcccaaactatgaattcaatttctttacttgctattggactatttaggttatctatttcttcttgagtaagctttggtttgtatctttcaaagagtttatctattttatctatgttgtccaatttctgggcataatgttgtttacaatatttccctataatcctgtgaatatctgtagtgtctatggtgatgccccctctttcagtcctgacactggtaatttgtgcttctctcaaatctttcttttcgtatgtatgtatgcacatatatatgtatatatgtatgtatctatcatctatgtatttgatacagggtctttctctgtcatcctggctgtactgcagtggcacaatcataacttactgtaacctggaactcctgggctcaattaatcctcccacctcagcctcccaagtagcaagggctacagatacgtgtcactacaccaagctaatttttttaaaaagatctttgtagaaatggagtcttgctatgttgcccaagctggtcttgaactcttggtctcaagcagttctcccaccttggcctcccaaagtgctgggattacatgcatgaactaccacacccatcctctaacaagcttttaatactattaatttccctctaggcactgtattacctgcaatttctgataggttgtattttcagtttccttcagttaaaaatattttctattttcccttatgactttatctttaggcccacaggctgtttagaagtattttgcttaatttccaaatatttgagaaattttcagatatctctcttactggtttttagtgtaatttcataataggaaacaggctttgtataatttcaattcttttaagcttgttatatggtctatcttggttccaagtgcagttaaaaaaaatgcattctgctgttgagtagggttttctataaatatatttatttgtctttttaagcacaaccattttcaccaaagatctcctgacacagaacacacagctttcttcttattcaatttggttgcagaaaatactgtcttacatatataacaggtttaccagggctaaagttctaaaggcaactagattaataaagaacttgaagcagatataatcgtttttctaagatacttcagaggttgtttatgcttgcagagctactaaaaccaagaagaatccatgaagggcggggggaagttggagctgatgagaactctattagatcaaaacagccacttgttatcagtgtcatttatgagccatttggccatacagtccctgcatgcaattgctcttcttgaatcatttcactctgagcacacatctgctggctagagtagaggctacttgagaatatggattatgtgtgatactgccttcgtccatcctaatacctaagctgagatgctcagcatttatttaatggctgtttttgaattatgataatcacaatttgatataagatagacattactgcgacaaatcaccatataaaatatttttcgttatttccaggtacatagaattacagatacatgtacaaaagccagtagaattaacatgatactggcaccaaatgagaaaaaaaggattaacatgatactggaatttcagacaaaaatccctgcattatgtttatcaaccactcaccaccagactagaagggctaaaggagaaaaaaaagacaagtattatattacatgaaactgttctccaagaaaaggacagtctctgagaaatagagtaaagtaagctgtggggatttttcccatttgaaactgctgggattgtacaggttaattatctgatttatgaataagagaaacttagggataaaagttgtttctctccaattgctttcatttcgtctttcctaaatcagaaaatgcagacttgtccagggaggtgctgtacaatggaaatattaatataatgtgagccataaatgtgatcatgaaaatatgtaattttatttttactttatttttttgagatggagtctcgctctgttgcccaggctggagtgcagtggcgttaccttggctcactgcaacctgcacctcctgggttcaagcaattctcctgcctcagtctcctgaatagctgggattacaggtgtgtgccaccacgcccggctaattttcgtatttttagtagagatggagtttcaccatgttggccaggctggtctcaaactcctgacctcaagtgatccacccaccttggcctcccaaagtgctgggattacaggcgtgagccactgcgccttgctgaaaatgtgtaattttaaatggtctaagagccacattaagaaagaaaaagcaggtaaaattaatttaaacaatgtattttatttaaattcatatcaaaattatgatttcaacatgtaatcaatattaaaaattattactggtattttacattctgtttcataccaagtcttcagaatccagtgcgtactttacgcttagaacacatcttgattccaactagctacacttcaagggctcaacagccacatagggctcaggactagtatataagagacagttcagggccagttattgggttcaagctttttagccctagacccttggctcaactatgaatagaatgggcaaagccttcctttctcttcttgtgcatgctttcaacacactcagtcttagtgataagagacagtcattcagtacatggcagttttctgccattttattagatgctttgcataattaaatgagagaagataatctaagtaatcacctaatgaaatctattgtagaaattcaaaatcccttttaaaagttaacctgcaatattaaaaactcagaaatattaataagagtattctatgtaggaggcttttgaaaaactcatagttctataggaaaattaagataattaatagacaaacatatcatttttttagcttattcttttgatttttagacttagaaaacaaaacaagacatacaggcatgtgtgttgagatacatacaccagctcatctgttcacaggtcagtttcaggtgctgagctgttactctgccccagtctaaccaactgctactcaattattattcctaggaaaattcctgtccctggataacaagagcaaccatttccacagtgcttcagggattcggtttttagccacaaagccaggcattcaacccagcaacctgagctaccaccttagctgaagaacagccactgtggagttcttgctggctgcagcctgtgtgctcgctcacacatgggcacagttctgagatgagtatgcaattaccttctttgctgacagctctgacagataaaggtcatcctctaccacttgccaaattcaggaatcccagaacaacctgattcagaagaatgtgaaagagagaagggagtttcaagtcctacctacacagttcaaaagcacaaaaccttacctgctgcactgcaggaggcagaagtgagaggcaagaagtaggtaggcatagaaagagaatctaggagatgctttccttctcttgcgaaagcctggaggggacccaaattcctttattctgcttgggcttggcttggcccttcttctccctacccccatcttttcagaatcaccagctgctgtggtttctccttcccttttatcttcaaatttcctccttcctgaactaccatgttcctatctttgtgttaaagattcatcagatgctaaagtccacagctgctaaaaaacaaataaacacagcacacaaatcaggatttgaattacacatttattgtgaacaatcatttgttagcctaaatgagaccctacactgatcgtatccaattacacaaaagactgctggtcaaaacacatgcgctgaaaccaactcacctaccttagcagaagtactgggaatctgacagacctgggttccaatcatgcctgcaccacttacctcctgccaaggtaggtgatgcttatccctcagacacttgctttgctcacctgtaaaagggtccaggtggcttactgcccagtttcatgcctccctggcccctacacctcaccctctgttcaagccatagtgatttttctcctactgacagtttattaaggtacaatttgtttagagtttataaagaaatcataagcatatggttttttaaacactaatattactattcataataatagctgacatttaagctcaccttatggcccaggtaccccaggtgcattatctcctgtatttctgtcaattccctacgattttacaggtaagaaaagtggtgagagaggggatgtgatttgccttccaatgtctacagagtggcaaatctgggactcaaaccaagtgttcctgactccaaggtgtgggatgctacctcagctccatggcacggccccacctgcagtctggcttgtgcctagtcacccctcaggtcatggcaaagacggcacttctcctaggaagcctccctcctcacctaggctcagttctctggtactctcccatcactgtatctgttaactacctggtttactaaactgagttataaactccacaagagcagggatcatcatgtctgccaaccacaactgtaacaaatgtttgttgactgaatacatgagggaagcctaattcagaggtggctgtgaggattaaatgaaatctatgggaagcaggagtaagcaggaaggctagcgagcccctcacagcttataagtacagtgctagctgtgtgagacgaacaagcaaaggaagaagctgacgccctaataagtgcaaggagctgtagaggttacttagaagacttggtcactcttctaaaaaagaaaaaccaaggtaaaaatgcacaaaatagcacagaacaagaaaataaccccagaaaccaaagattttcaggacagaaatcggatgggctaagtcttatctagagcagagaggggtattgtgactggagcccatgtttcctgccccctatctaaggctctttccagaacactacaggctttgacaggaaatcttgagaggatcacaggagttgctacttgaccccactgtcaggaaccaggttgcagactggccttagggaggctcaggacaagaggctgaggcacaactttcctccaagcctccctaattctgccccttcacactcctactgacctgaaaccaggttgctcttgcagaaagcaatttcccggtgcaaacctaatcaccttttgataccattaatcagccatttccccccacccaggatctgaccaagtccctggattaagctgcaaatgaaatttccagatttcagcaattgtcgaatcttgagagaagcagcaactccaaggtcttcatcctgttctccatatagtgcccaactatccactgctcagctgttctaaaattcttaagcctgaatttcttaccaggtaaagtattcatccaaccttgttatgagacatgggaatgggtatagagagatatggcatatagatagcaacattccatttcaacagctcaaccgaaaactctgagatgctctcaacccacactaaagtgactcagacaagctttgtttctttctgaagctagagctgttaaaatggacacagtgcaccccgctggggacaatgacccagtcagccaggctgcagctgtctggcccacagactggtcctgtgatggcatttgtaaaaggtcaggggtttctctcaattctctgctggatttagaagccacgtatggctgaaagtacaaaaccacaatctataaaggggccatttaatattttaaaagattaaaagctacaattaaccttttgcaaaataataaagtctggaagaactactaccgtgctttcagttacagtgccaatcagaagttcaaggccaatgctctattgctcagcttgatactgagctgaccagagaaaagtgccagccctatagcccgaggaagtgatgagaattcaggcactgtgtgcctggctgacagcagtaacaatgcagcatgttttcaccctgctgacatgtggctgtgctggcatttcagtccacctgtcattcagatccctgtatcattgcttcatcaagtgtatcagggaaggagcaaatcctacacaagaatagagccagggcctgaggcccctcctgttgaaaatcatctctgaagcacataaaaaggtaattactctctgtctccaaaactaaaacataagcaggattttgtctttaccaagcctaaaccttttttgatgtattaatggtttaggaccagcatcatcagtatcagaaacacagcaccatagatcatggagtttgagaatatggcaggggtgggaccgtctaataaactttataggtcctgagatacaaatttgattttacccatgaaaggcaagcagacccacagacatccagaattcatactataaatgatagccttaagcagggagtcaacattcaaaataaatgctgctcaaagacactataaagaacattaaaaaaagaaaagaaagaaagcccattaggggagggaagcgccgttaataccgtccacatcctccaactgcctgcttcaaggtcaccttcccagcagtgacactagaagcactggagtcagggctaaagccacagctttatcctgctctcctatcctccagtgcagaatctcccaaactcaggtggccatagaacatttttgaaattataatgcactgacagacagtaatagaataggagataacgtggattcaaattagaaaggtaaaatgatctcagatgaaccactgaaatgaccaaggtctgagttacattaatacatgataaacattaaatcatattaacaagggttaaaattgtaagataaatagatcagcaagcaaataaattagcagcctctgtcacttttcagatcacgcattctatcaaacaactttttgggtatgtacaaatatatactttacttataatttatacacatgtcccaatatatacagcttttatataaagtacagaatagaaataaagagcaaaagatgaaataattatccttttgataatttttagtttttccagtatgacagctttgtactatcttcagctgacaccttaaggcacaatacatacactcaaggtgaggatcactgttgatgatcctgagtgtaaatctgtatttcagagtcttactgataatttccaaggtttttggccaaaagtcgatatatggtcatctgtatgttaaatatcagcaaggcttatttactttctcaactagaaagagcaaagactgatacagacggaaactttactgttttcttcttgattagtgtcttctgcaacccatttgaacaccactgaaagaagcaatggaatgaaaacagtgagtcaacaactatggcctgggcacccacaaaaaaacacgctcatgccctagaaccatcttgctggcaaactcatctttggagtacagcaaacctcttcttaacggctaattattgaacaataattacaataagaatcttcgatgtttttgctacttttcttacagagttcagaaggtattttcaggatgctaaaaactgtacttatatataggtaaccagaattacaattcagccatgccataagttaatgaattgagtgaaaaactggcaaaatgttgacaattgttgaaactgggtgtcaggcacatggggggttcattttactattgcctctacttttgtctgtatttaatattttcatcaataaatagtttaaaaatgaaagttcaaaaaagtcattttgggactacctgacatccttaaccatattgttcctatggaattcaggaagcacgttccacacagctgcctctccaacttcaacacaaggggtaccttctggtaagtgagggctgcctgcatcaaaacatctcactgattagccgtgcatggtgatgcgcacatgtaatcccagcaactctggaggctgaggcaggagaattgcctgaacccgggaggcagaggttgcagtgagccaagattgtgccactgcactctagcctgagcgacagagcgaggcaaaacaaacaaacatacaaacaaacaaacatctcacctgaaaactattctacaaggggcactgggaaatagccatgtttataaaaaccatacataaaaactcaggtaacccattataggggcaggatattttcagtaaagtataatgtagaaagaaatgcactcacatttcttgtccttactctaagttataagagaccaacaaaaagcaatccaagtctctttgggctgcatgtaatggccattttctcctaaagacttgcttactctaatttcttgaaagaatttcaacaaattgagattaaatttacaaattggaatttctcctcaaaattgatcatgtcctccccccaaaattattcttttatatatcaaaaccaaagcctatattcagggaacctatttttaaaacctatccctcttattaaatatctacatgtgacacaatctaaagaaaaaaaagttctccaaaatccatttctattagtttctgcaatggcctaaatataattttagtcaaacttgcaggccatatctttaaaaaagagatggattatcactctggaaaccaatatgctactgctgtgttctgctggtggtttataaatctgagataaagaatttgctcgtgaatataattcaaaattgcatctgagtcatatactcaaacataaatccaagacccttatgaaatcttcaggaagcttttcattataaacatgtagaaagttagtgtgcaacaggaatggctctgaattaaaaataatcctgggcaagggaccatctgatttggctaagcaaacatgccaagtgcagtttgctgactctaaatgccccattttccccgtgcccaaacccaccctttcccaaggtccccagcttagggcatctagacagtcacccaacataagaactcctgaaggctaccacacagggggtgtcactacagggatgccattggtctgtggcacacacgaggctctttgccttgagctaacctgcccagcccaccatgctctaagtcctatgagcttcttctcacattttggtattggcctttgtgccaataccatgtgcattcacatgccacttcctgttgaatgcctgtagcaacctttctcctatttgctgcttctcatcagctatgaactccaacatactaagaacaagcaagctttggaggaggtcctaagaattcttctgtggactttgtgacagctctttggccacatagaggtcttactttttttttttttttttttttttttttgagacggagtttcgttcttgttgcccaggcaataagagtacagtggtgcgatctcagctcactgcaacctccacctcccaggttcaagcaattcgcctgcctcagcctcccaagtagctaggattacaggcatgccccaccacacccggctaattttgtatttttagcagagaagggggttccaccatgttggccaggctggtcttgaactcctgacctcacatgatccacccacctcagcctcctaaagtgctgggattacaggcgtgagccatcacacccggcctcttttttacttatattctagacagtacagctgctgatcaaatgggttcagagcgggagacggcggagtaccatagggcctagacaaccacacaacagtctttgagattagctactacttggctgcaaattggtctttttggtttgtcatcccataaatgtatcactgctgcagcatcatatataaatacatatgtctgcagtgaggaccctgataaagtacacaaaaactttccttttctccattctttcctcagcatgtgaagttacacagaagaaaaactgcaatgctccttgaactgttcatggaaccagtaaaggggcaagactcttagtccagtctggctgcaagcagttcctggacccatcagtgagaacttatacggctcagaggttcaaaaccacatggtctcctaaaacagtccctgagcacccagctcactgcctgactggttcacagctcatatatggagtcctcttagggcataaagtatgcgggatctcggtcctgggctgggcctgtcttggagatctcggtcgcaggcaggtattatagtcttccatattggtgagctttttaaaaaggcttccgtaccttccctcaagaattgcaccatcttctgtaaataccaactaaattggatcagatgtacacaaaataattcaaaccagctcacttatcccctgaaatcaaacattttcaataagtggctcttttggcttgccctagaaacaagttcacaggcctgttttataaagaaaccaaggtctatctcctacatcactttaaagccatcaacctggaggcagagtggaaatctggaactcatcactgcccacttctccaatcctccacttagtatttgccttttttttttcttttttttttttgagacggagtctcgctctgtcactcaggctggagggcagtggtgcgatcgcagctcactgcaagctctgcctcccgggttcacgccattctcctgcctcagcctcatgactagctgggactacaggcacccgccaccacgcccagctaatttttttgtatttttagtagagacaggatttcactgttagccaggatggtctcgatctcctgacctcgtgatccacccgcctcagcctcccaaagtgctgggattacaggcgtgagccaccacacccggccagtatttgcctttctactactccctttgcattcaggagggcagcactgcgtgagcactggtcacaggagagcagacttgggtcaccagtcgatttctaagcaacaaatgtcaagcttcaaatcctgttaaagatggactgtcttggcttgtccactttcagaaaaaaagcttaggaaaagctttactgttttgtttttgtttttgtttttgttttgtttttttgagacagggtcacactctattgcccaggctggagtgcggtggcatgatcacggctcagtgcagccttgaccccctgagctcaagcgatcttcctgcctcagcctctcgagtggctgggactgcaagctgcgccaccacacctggctttttaaacaaaacttttatagagatggtggtcccactatgttgcccaggctggtcttgaactcctgacctcaagcaatcctctgccttggccttccaaagtgctgggattacaggggtgagccaccacgcccaaccaaaagctttactttttagtaattattttcattttcttaaaagatcactcctattaaaccctattttttttaaagcaagcatcaaggatttattttatttttttagagacagagtctcattctgtcacccaggctggagtgcagtggtgttatcatggctcactgcagcttcaaactcctggactcaagtgatcctcccacctcaccctcctgagtagctgggaccacatgcatgcaccaccatacctggctaattattttaaattttttgtagagatgggatcttgctgtgttgcccaggctggtctcaaactcctggcttcaggtgatccttctgcctcagcctcccaaagctctgggattacaggtgtgggctaccatgcccagctagggatttcttttaaaaagcaacatcaccaggagatgacagggtcaataccaactcactgctcaaatcttctgataaaatctcactccttcattcatctacccatccattcagccaacaattacctatcacatacctaatacgtggcaggtgctgaggatacaagatgaacaagatggacagggcctatgcattcatgaagcttatggaatattagggaagacagataacagtaaacttgggtcctaaagttaatgtcaacgctgctaaatgttttaaagtaccatagtttaaaaacggttcccaagagtataatctcccattcagtaaaattaactaagtccaaagaacatttgcatttgaaattagcttgtaacagacagcatatccttctaattcatagtagtgtcccttttctaaatagagaatgcattcagcccagtttctaaaaacaacaccgcatacccaacaaaagacttcaggctaaaatatacttttcctctttagtaatgaaaccattctaaacaagttaaggctaagaatgaaaaaagaattaccaaagtgatcagagttgtccaaacagcaataaggaagaataaatgcttagtctatgacagtttgcttggattaggggtgtcagtctatgagagcattaaagtacttgttctctacaaggaaaattcaaatacgtttatcctagccactgtgggcaaaacaccttccttaaaagaaaacactgtcctacaaggctccaccacacactagctgtgtgaccttgggcaataacttaacttctgtgggcctccatctgcatgagcacatatacgctaactgaacagggttgtgacgaggattgaatgagataatacacccaacacttagcccactgcagtgctcagcatcacagtgttgcctttattcttccagtgatcagatcaaagcaaccaggctgtgctataacattaaaatcccattccatcggcaccctgtgtagttagtaaactcttgacatatcacagtgattggattgacactaagtaatttacatctgagaagagggtaggaaaaaaacactaaagattgactggattaaaattaaaatcttcctaagacaagtcagtgctcaaaccagtttaaactgaatgccacagtcagtcattaggtactagagttaatataagcgcaatttttccttgctaaagttagcacgaacttacttggagagcacgtacttcaggtagtcactgcaccaccctatcagaaaaagctcagcaaccacgcgtgagtcatttttgctccacttcatttattaacgctaagcttaagggtgtcacatccacaagactcaacacagcttctcttaaagaagaaagtgtcataacatattgccatgtgaaagaaagaaaaaaggtcagactgcaaaatatatgatcctattaaatcaaaacaaaaagagtgggtgagtatgcatgtatgtgatgcatatcttcatatatgcagaaattttaaaaacccaaaaaactaggatatataccaaatcattaactgtaattcccttccactagtgtgatcaaaaaattttttttctttgggtttcctgtgtttttaaaacattaaccatgtatttcctttgaacaaggaaaaaagtcaatgaaatttaaaaacaaatattattttggatcctaaaagaattctccccaacccccagctttttttttttttttttttttttttgcaatagggacatcacgctgccatttttagagcattctcatttaaatagatgggagaataatacctttaatttaactaagaagccaaacaagctttgaatttgaaaagctaaagattaaaaccaataattaaggttcaaaattgctccagggaaacgaagttctccttttcatacatctcctgtaacacaaggaattctccaggcaggtctaggcatgaaccttctgcagagaggtgtcatgggaaaagcaggaagaggacacacaaaggctccaaagcctacctctgttacttattttattattattattattatttttgagacagagtctcactctgtcacccaggctggagtgcagtggcgcaatctcagctcactgcagcctcagcccccaggcccaagcaattctcctgcttcagcctcccaagtagctgagattacaggtgcacgccaccaagcccagctaatttttgtatttttagtagagacagggtttcaccatgttggccaggctggtcttgaactcctgacctcaagtgatctgcctccctcagcctccaaaagtgctggaattacaggcgtgagccaccatgcccagcctctattacttattaagtagcaagacaccttggacaatgaccacctctctcagagcctgaatctcctcatgtgtaaaactggaagcatcaaactcctggatggttatgaagctgaattagataacttttataaagcagtggtctctaaacttttctggctttccaccttatctctaaaaacatatacaatcagccctctatatccatggattcaatcaaccttggattgaaaatatgaaattaaaaaaaataataacaatccaacagtaaaaaagatacaaatttaaaaatacagcataataaccattcacattatgttaggtattataagtaatctagagatgatttaaaagtatacaggagaatgagcataggttatatattaatacaaatactatgccattttacataagggactgaaacattcatcgattttggtatccttggggggggtcctgaaaccaatgcccccttggatactgtacataaatgtgtgtgtgcatataacttacaaactatataagttctaattgtacttttatagtgtgtatacacataaccagaaattttaatatgcaaaaaaataataataaatagaagttctaggctggacacagcggctcacacctgtaatcccagcactttggaaggctgaagcaggaggatcacttgagcccagaagtttgagaccacactaggcaacatagtgagactccgtctcaatcgacagattagacagctagatgaatgtttcttcctgcttcccaatgaattgtcccagggacccctcaggaggcccaaaagcctgacatctgatatgcagtgaaagatgacatctttctccatcccattccccaccgtgcaaaggaaagaggagcaccagcaggggccaacagctgacattaatttgccttctcttcttccttccctcctcttgcaattccgggagtatttaacccttcttcaaggtctcaagaatagtgaaccctaacagactcagccattaaaaatgctcagcaagtagcacattccaagtaagtttagagacagaccagaacaggaactgatgtaaacactattctctagagtcacagagatctttcagaaactactttgtgaatctgcaaagcttgggttagaatgaggtttaccagatgagttgactgggtgcctggagaatgaagtggccccaagctcttaaaaaacacggcctgtgcaaaaatctttaacagctaaccaaaaaacaagtcagatctaaaatacggctgtatgtgagaagtgtgtgtactagccagctcccggggagaggcttaccttcagtatttcaggttctttgatatccagagatcttgtgttccagtgtcgcagatttttgtgtaacttgtgatatttatgagcacttggtggtgtaaaaaaccaaatcacgcaaactgcagtcatgaatccaaggccaattcccagaaagagtccactcacatagtgggggagggggaggatgaggtacacatagacacacattataaagaagcccaacgtcttcactggcaattccgggtgctgcacggccgagtccacctcgtcctcactgtcaaggaccacaccatcttccgcgagcacctctggcttgagaggaatatctgagagcttatcaactttactctccccctccgtttccaaatcgaagtcctcagtgtacagttcacaaaactcttcatcttctttgctcactaaggcagacaaagaacatttctccagaactagagaacttgtcttcaggcctaaatccttcagactgctcccctgggaacttttcagttctatctctcttgtgggctcaccagtggactttgggtggtcacttctggggatgttggaatcacttccgtagccatccccctcagaatcacactcctcctccttgatgctgtagttgttattgctttccaagtgcccattcaagctggacagattggagagttctgaagcacttgaagataaggctttgggcctatggctgccactttcttcccctataattttactaaggagctgaaaaggctcatagatgacttctgaaaggcgtcgtttagtatcttcaattttagcctccatttcgggcactttaaaaaaggaacgagtatcagagggagaagtcagtggggaagaaggtgcagttttggaatctccacctgtgtttcggggctgtgtgaactgcttgaacaggtgtaagttcagtttggaatcaggtggcttataggacactgtatccgactcctgccgggaagtgtccgtggacagagacttgactaatgtcttcatcaagtgcctgtgccttgcggggtgtggggattcttttggctccacctcggtcgacagggacttcacaaggctcatgaagggttttgcactggaaagggtggaggttgaggcactggatgagaggatgggagacttagaaggagaggacaatggggaggaagaactggttttctgctcagaaagggatgacacactgggagagctagctaagggccccgacgaagacgaccctggggacacagccaatggcactgtacttaatacttgtgctgctggaacaggggactccaacagctttacagtgttcttggagacgggcaaaatggcaggggcctgggacacggacagtccatctgccaggacaggcgaggcagcagggccggcggggtcatggccaacttggggttcaagatagaggtcttccttggcttccagccctgttacaatgctttggtcatccagcccctcctcaaagtactccctgaactcctcctcctcttcctcctcctcctcgccggatgccgagaagtgaatggcgatggtatctcgggacacggacctctgcacgtgcactttaggggctgatggttttggcatgtcagtggttttctcggcatggcgaccatacagacttgtcattgccggcttcacaagggctcaggctctgtgaaaacagtgagaaaaccagaagtcagagagcagtttctccacaggagacgctgtcattcgcagataggagcacagatgaagctgtttaagtggtgattatgcttttacttggcagatgtccaccgtttttcacttcattgggtttaatggtttaattttcactaaattccagttaggcattctcttttatgagcaaactacataaccaatgttataaatgccatacaatctgtcttacttcacaacacctgagtaatcatttcctcccttttaactggttaatttctaccaacaattttctatcttaagccttaaaatacctgaacaatagatgttaccagcattgcttgagaagcccaacaggataaaatgtagcatcctgttgagtttgaggatcttggaacaaaaatttcactaggagtcttgtagctgtaacaagctaacccaggaggggtattgcgttcactgcaattttcacagcaatcctaacaattatttggcctgcatctcccaacttcctgctattgcaagtaagtagcaaagtatccaaatgtggaaatctgtaaactaattgccatggtctgttggcctcctcaaatggtaggtaccataagaccagagtatttaggcagccatgaagacatgaggcagccatgaggacatggccacgttctgaggcatcaggataaagcaaacatattttaaactgaatgcaagattcatgtgtcaggaaaatgaagtatcactgctgtaacccaccaccaaccaagaactctaccaaggactgtggtgagagatgtggaagctatgctttctgcccttctggagcttaatagctgattgcttctttctggagcttagctggaacgaagtcagaagcctgaaaagctgggcagcaaaacaagatgccacgcccaccttgtgacatggtacagtcatctctctttattcactcatggcccatttactgggcactagccctactatgtaaaaattaagaccacacctggacagagaccatgtaaaaagagccaagacacagggcacgcttcagaagttctgaggaggatgacaccagtgtgggaggtgggacatccaacgggtctttggaactgatgggtgagttgtagtgggatgagcatgattaggcagagggaagggacaagggcataaagatggcaatgggcatggtgtgtgcagccacctggctctattctgtttccaggacagagggtgagtgtggggagcagtgggaggccattgagacaaaaggggcatcgtggggcagtggaaagagcacccagcttgggcccaggacatagggcttctagtacttgtctttctacagctgactctgtgggactttgaacaagccagggcctctcgatgtctcagtatcttggtctgtaaaatggaggtagatccacagtcctttccaaatttaaaacgctacacgtttatgtttacaggtgactgtatccaacccaacacaatacgcttacaagtaatctaccacaatcgacattatgtggcttgcttatttctttaatttgaagagctcctaatttaagccttctgctaaatattcaggttcaaaatgctggcaactgatattaccaacaagagaaatcataaaatgggtaggggaataagggggtttgggaaacagtgatcctggatcactagaaggaggaaatattccaaggatgacaagaattacattcaagggcccagctgcaacatggactcaagctgaaactacacaatttcagtatcaaatatttgagagaagttaccgtaaaaactttcacacacagttctgtccaggctcatttgtgaccctcaggctttcctatcctgaatccaggaaaagggaatgatctctatccaccaacaaagcaatttaaatccaggaactggcagcagccagaaaaacacagcctcgggtccaggacaatccttccctgttatcttaagctaaggaatttgtaggcttagtaagaagaaaaatatcagaagcaacatatgtttttcatttaactatcacctagttttataagggcaatttaaaaagaaaattatagaggtaatttaaaaagaaaagtttggtatttgataattctcagtgggctgaaaaactcatttaagttgctttcataacataaaaggatgatatgtaaggctctgctgttctgaggctgcttcacccacagcggtggctataaatgaaggtaactgtgggcacaagtccaagtacaaagtgcatgattttgaggttgaacagagtgaatcggtccttcaggaaccaaggcaagagtggagaggcccgtctgcagttgaggataagaaggcctgggaatctaagggcaaagttaggcccagcctagcgccaaagggtgaaaacagcaatgcgttcagaagcctgcggtctcagcagtcaggccaggccccagggaacaaaaagctggcacctgctcaggaagcagagttatttttcgtgtggaggtcaccaggaccctgcttgcctaatcctccacacacttgggccccctgactggccaggtaaagcgacctctgatcagactgggcggacagagctgaaggtgggccccagggagagctgggtgtcaggtggccagatgggggcaggctctggctcactgttgttattgtcctccagggctcactcagacagtggcctcagaggttcacagtaaatgcccccaaacccacactaaccaaagcctggttccacttctctagatttttactaaaataagccacacgaggccggagcatcactactgctctttaaatacaagaaaatgtccaggcttctgtttgctcatctgcaaaatgaggggattaggctagataaacaaaggctgcttccaggccccaaactgctgggtaattgagtgtgctagaaccagagaccatggtttgggctctagacaacctatcaagtggtcactgcctctgcctcctcctggggaccacttcaagttccctcttctctctgtcctcccagtggctggctgctaaggccaactgagccgaccctcccacagccacagccatgcaggacagccaaggccaagaggaaggacctgactgacacccaggaagactacatggtttgtccaagggcacagcactgacaacatgggcttcctgacactgaggcccgatgcccggcagggtgccttttcaaacatgccacacacgctctttattcctgctttgtcccagcttttgtacctgccctctgtgctccgtcatggacagctcacttacaagctaagacctcagttctcaaccagcagcatgtgactggccgcactgagaaatgaaaggtctcattatccatctgacaatctggtaccatataaaatggctagcctcctgccctctactcctgaaactcaattatacccaggctcaaaaaaagagacaagcttctctcaagccctcaggaactgaaaggccaaaaaagaaagcttccttctcaacagtctctttttcccatagttccagcagactacaaagcccttgggttttaacactgaccccccaagccttgtgatgggaaggagagctgtagctcatgttgtcgccaggctcccataggtatgatttcgtgctggagaggtgtttaagcaaaagtctgacatgatcaaagtggtacacaaaattaatcacgtcccgtcccagaatggatgagggtggcagaggcaacatggaaaaacaggtctggagtctggttgtctgggaaggcaggctccattatcaggctcacaattctgctgaacacaactaacaatgaatacattgaaaaaaaatttctgaatggctgggcacggtggctcacacctgtaatcccagctactagggaggctgaggcacaagaattgcttgaatccatgaaacagaggtttcagtgagctgagactgtggcactgcaccccagcgtgggtgacaaagtgagactctgactccagaaaaaaaaaagtctgaaaggctttgaagcttcaagaactgagcaaggaataacagtacagaaactaaagaaaacaggaaccccgaggtatgagctctagagaagccaccttgccctcaagcattggcctagcctagtctggcaaaggacactttcacttttttttttttttttttttttttttttttaaagacagagtcttgctctgtcacccagcctggagtgcagtggcacaatctcggctcattgcaacctccgcctcccaggttcaagtgattctcctgcctcgggctccccagtagctgggactacagacgcccgccaccacacctggctaatttttgtatttttagtagaaatggggtttcaccatattggccaggctggtcttgaactcctgaccttgtgatccaccaatcttggcctcccaaagtgctgggattacaggtgtgagccaccacacccggcagcctttcactttaacagcctcctgagcagaagtcaacatccagggctggccagcgtggaacaccaactggagactcttcctcaaggagccgggaccccaaaggactacagctactaggtaacaggtgaaccagaagcaaaccaggcctcacttagactggaggcctaggtttgcctcctctgaaagaaccagggaatctcaaccatgagcttcttccaaggtggtcttggaccagaaatacctccagggacctggcagaagaaattctctccccacgaaagcaaagcactttcacccgaagcctcaagttattccgagaaatactttctcaaatacaatgaatggtaagcacataaccaaaggtaaccaagcagatgaggaaacaagactaaggaccagcagaaatagaatataacagaaaaataaggacttcagataatggaattatcaggcatagatttgtttttacaagtatgcatcaagatgagtttaaaatacctacagggagtccaggcacagtggctcacgcctgtaatcccagcactttgggaggctgaggtgggtggatcccttgaggtcaggaattcgagaccagcctggccaacatggcaaaacctcatctctactaaaaatacaaaaatcagctggacgtggtggcgcatgcctgtaattcaagctactcaggaggctgagacacaagaatcgcttgaaactgagagaaggaggtttcagtaaggcaagattgggccactgcactccagcctgggcaacagagtgagactccatctcatcaaataaaataaaataaaataaaataaaataaaataaaataaaatatctaaagggagaattacaggcaagcagaccagttttaaggctattctggcagccaaagcatgatgtaagaaatgcctaaactagaggagtggatgtggagctggcaagaaaaggcagatggaaagagaaggaaaagaatgaagcaacaggaccagatggaaggttggaaaggaaaagaaaacatgaggaacagtccaaattgacttaagtcactaaagagataagtctagttcctgtgaaggcaggcaggggagataagggacgtggtacacaggtaatgctcctcccctaccccactcagagacgtccacatcctagtccctaaaacctgtgaatctgttacttcccatggcaacagagattttgcagatatgattgagatggaaagattatcctggattgcctgggtgggcccaatgtaatcacaagtgcccttaaaagatatgaggaaggcagaaactcagagaaggcgatgtgaaacagaagcagacatcagagtaatgagagcaaggagcatgacccaaggaatgcaggtggcctatggaggggaagaaaatatctgcaaatcatttatctgataaggggttaatatccagaaaatgtaaagaactctaataacaaacaacttgacaccttatacaaaaattaactcaagatggattaaagacttaaacggaaaacccaaaaactataaaaaccctagaagaaaatctaggcaataccattcatgacataggcacagacaaagatttcatgatgaaaacgtcaaaagcaattgcaacaaaagcaaaaactgacaaatggaatctcattaaactaaagagcttctgtgcagcaaaataaactatcatcagagtgaacaggcaacctacagaatgggagaaaatttttgtaatctatccatctgacaaaggtctaatatccagaatctacaaggaacctaaacaaacgtacaagaaaaaaacaaccccattaaaaagtgggcaaaggacatgaacagacatttctcaaaagaagacatttatgcagcaaaaaaaatatgaaaaaaagctaaatatcactgatcattagagaaatgcaaatcaaaaccacaatgagataccatctcacaccagtcagatgacaattattaaaaagtcaagagaaaacagatgctggtgagactgtggagaaataggaatgcttttacactgttggtgggaatataaattagttcaaccattgtggaagacagtgtggcaattcctcaaagacctagaaccagaaataccagttgacccagcaatgccattactgggtatatacccaaaggaatataaatcattctcttataaagatacatgcacacatacgttcactgcaccactattcacaatagtaaagacacagaatcaacccaaatgcccatcaatgatagactggactaaaaaaatgtggtatatatacaccatggaatactatgcagccataaaaagaaatgagatcatgtcctttccagggacatggatggagctagaagccattatcctcagcaaactaacacagtaacagaaaaccaaacactgcatgttcttacttataagtgggacctgaacaatgagaacacttggacacagagaagggaataacacacactggggcctgtcagggggcagggggcaggaagagggagagcatcaggataaatagctaatgcatgtgggggttaacacctaggttgacaggtgcagcaaacaagcatggcacacatttacctatgttaacaaacctgcaagtcctgcacatgtatcctggaacttaaaattaaattacatttttaaaaaaatgggcaaaggacttgaaaggacagttctccaaaaagatatacaaatgggcaacaagcacatggaaagatgctcaacatcactagttattaggaaaatgcaattaaaaccgcaatgagatatcaccccacatccattaggatgactacaattaaaaaagaagaaaagaagtgttggcaaggttgtacagagattagagtttttgtgcactattggcaagactgtaaaatggcgcaactggtatggaagtttctcaaaagttaaaaatagaactaccatataatcctccaatcccacttctgggtatatatccaaaagaattgaaagcagggtctcaaaaagatatttgcacacccatgttcacagtggcatttcagacaatggccaagaggtggaagcaacccaagtgtccactgacagatgaatggacaaacacaagggaatattattcagccttaaaaggaaggaaatcctgtcacatgctactacatggatgaaccttgaggacattatgctaacgaaataagctgactagtcacataaagacaaatactgtatgattccacttacaagaggtatctaaagtagtcaaattcatagcaacagaaaggaaaatgaagagttccatgggctggcagaggaggaaatggggagatgttgtttaatggatacagaatttcagttttataagatgaaaaagttctggagattggttgtataacaatgtgaatatacttaatactaccgaacttaaaaatggttaagatggtaaaattttgctatacgtattttatcataattaaaaataaaatttgaaggccagtatatgtgcaggttagttacattttaaaaagcaaaaattggtcaggcgcggtggctcacgcttgtaatctcagcactttgggaggctgaggtgggtggatcaccaggtcaagagattgagaccatcctggccaacatggtgaaacccgtctctactaaaaatacaaaaattagctgggtgtggtggtgggcacctgtaatcccagttactcgggaggctgagggaggagaatcgctttaacctgggagtcagaggttgcagtgagctgagatcgcgccactgcactccagcctggcaacagagcgagattccaactcacaaaaaaaaaaaaaaaaaagcaaaaattggaggtcaagatgggaggactgcttaaggctaggagtttgagaccagcctggtcaacacaggagacccatcactattttaaaaaataaacaaataatataaaattttaaaagatttcactcttcaaaactacaaagaaataatactctgaaccacttgttatgccaactaaaacaattctattcaaaaacttcacattgttctttagtgtttacactacagtgtggttaagttataagataatagatgtaaatgtatttatgctcccatacatttggggtggggcaggggtggggtgggggaggctatttggagccaaatgccctctaaaccttagccttgatccggtatgtttccagaaagcaggatgtctcaaactcttctgctgatgggtccttcctaaggtctttgccagaatcctcctttaaggttgctatccctatgaagaagttcatctctcccattaagactgagaaagcctctaataagggcttctctctccagaatttatgtaggattctgttctatctagtttacaaattagtagctgccatctaacttgaactcataaaaaacaaaggcctcaaactggagccaactgcgctctgtgtcagtggagtcagagtgagcgtatcaaacagcaatgaggtttatttgctttctgttcacccaaaaaggtcatcatcatcaattaggccatgaaaaaccaatcaacaataaatcaggctgtataataaaaaatgaagagccatttcaagactcaatattagcatttattaattccaagataatattaacctcactgaatctggctttttttttttttttttcactttttttctttggtctcattttctactaataactgcccttcctagctctgtctttcacaatcctggggttctagaatcagagccataaaaagagcagatggttcgttccaggccactcaattatcaccaacacgtgtttgttcatagcaaacacactaggccaaatagtagtatagccatgaatattatttacttctaattcatatactagattagaggaaatactggaggaaagaatgagagacagggtaaggcagggagggaagaaagcaaatttcattgaaaatggaaccagcctccaggtacagtgtacagtgagcacggtaacagagcatctttttttttttttttttttgcgatggagtttcactcttattgcccaggctggagagcaatggcacgatctaggctcactgcaacctccagctcccaggttcaagcgattctcctgcttcagcctcctgagttgctgggattacaagtgcctgccacaacacctgactaatgttttttatttttagtagagacggggttttaccatgttggccaggaggccgaggcaggtaacacagcatctgaaggggcaagcctggtgtcgagtgtgcttcctttctcgggaccatccctaatccttcaaggtcattattcacattctttgtctttgtaaaattcagcctgttaggcatttgctacctctgaacaagcttgcatttggacatttgatgtatgagtaccatctgctagcttgggttatgtcagtcaacagtttcaatccaaaagctcctggcagaggaaaagaaggcaagctgcattctattgcagaggatgtcttaatacttcttacctgtgcattttttaataggagttggttttgtaaaaaggagggaaaaggctataagattctgtatttttctgccttgatgccacagagcaaaacagtgaatctggtcaaaaccaaccacggcaggaaggtctgatttagcctacaaatctcaagtacatcttaagagctatcccttgattcatttaaattcaatgaagcagctgagaactgccagcagccattctaatctgttaatactccacctcacaaacaaaaatcaatatgacattgtagataatgaactagctctagccttagtttcatttaaagaaaagaaaaagacaagactctatcttcatcactggcaagaaacttggaaatcctttcccattagttgttaggttcccaggcccctactcaccatctcttccgacccagcagggtcctgcaccaccaccaacacagcacagggtttagacgaagaaactagcaggcccactcccttccaccaccgcatagaccttttacctgccatgaagaaagcccactctgggaagagtgccacatcccagaggaaaggggggttcgaaagcatcaatacaattagaattttgctttatagattgctagatggctcaaataacaaaatcaaattcaattcacagtaactcattgaaaaccaggtcatgcgttcagcacaaccatacaaggcctgtggaggtttataaaaaataataatgggggcatctacaggggaaaactcaaggagacaacacatagacatcagaaaatgacatcaatatggggtcacagaaaccctagaataagtaatgataactcaggacaggtgtgtcctaaacagatggtacttatcaagtaaagaagtctgggaataacttttttttttttaaagcagaaaagtcatctatgtgtcttagaaggaggatatgcagagaagagaatattgcaggctgggcacagtggctcaagcctgtaattccaacactctgagaagccgaggcgggaggaatgcttgagtccaggggttcgagaccagcctggacaatacagcgagacactatctctatttaaaaacaacaaaaaaagaatattgtggatatgaagcaacagcacatggaagggcattgagatgggaacaaggcagctacacaagagggacgttaactgctacctgaagctgaggggtggtgctaggggtgaggaaagaatattaatatttgagttcaggagcaggcaatcaattgttccaaacctctaaatgtgcttgaatttatatttaaatcttaaaaagaaaacctttccatgtacttttcaccaatcattcctaaaccgtaggctcttgagaaatctgaaaaccaggagtaagcatttttcttcagaggaatgaatgcctggaagccaagagagtatggtgccgaaagcccaagatatgagaatagtgtgttgtggctgtggtcacaaaacaacacatttttcttttcttttctttttttttgtttgttttttgtttttttgagacagagtctcgatctgtcacccaggctggagtgcagtggcaagatttcagctcactccaacctctacctcccgggttcaagccattctcttgcctcagcctcccaagtagctgggattacaggtgtatgccaccacaaccagctaatttttgtatttttagtagaaacagaaattcgccatgttggccaggctggtcttgaactcctggcctcaggtgatctgcctgccttggcttcccaaagtgctgggattacaggcggaagccaccatgcctagccaaaacaacacattttcaaaagctgatgctcatggggtaacatgttaacaacaatgtacctttgggaaagggtttaagattccatttttacttttgcatccattttaaagtttgaaactatgtccaaattaaaaacaaaagcagcattcctaaccactgtttggctttggggatatcatgagagctgctcccctcccgtccctattggttctaccagttgggattatcaagcagggttccaggcagtaagaggagagagctgaagttgtaccattccttaaattctcaagcttcattttgaaataatgacagattctcaggaagttgccaaagtagtacagagaggttccatgtacttttcaccaatcatttctaaaattttaaaggcaaatcttgtaagtcagataaattccaagtggttaagaaatcatgtttttaactttcatgcaatgtaagaaaaatgcattccacctggcagagtaaaacttccccttagaaggacttacagtctttcttaaggtctttctttaatggtcaaatttaggaaggcatcttcaataggtatctcccaagtacatgaacaggcacttcacccaaaagttcaaatggccaagaaacaaataaaaaactcaaccttactaaaaataatacagaattggaaacaaaccgatgaaataatttctctcaatgattaaaacatgtatgatgctggcaagggcacaatgagacaaaccctctcttgcactaaggctggaacataattagcaaaaactttgctgaaaactggtattagaaactagaaaattagtaaaaacttttctgtagtataaaagtagtataaaaaataataaaatatttataaaaaataatgggtgcatccacagggaaaactcaaggagacaacacatagacatcagaaaatgacatcaggctgggcacgggggctcacgcctgtaatcccagctctttgggaggtcgaggcaggcagatcacaaggtcaagagatcgagaccatctgggccaacatggtgaaaccccgcctctactgaaaatacaaaaattagctgggcgtggcggtgcgcgcctgtagtcccagctactcgggagggtgaggcaggagaattacttgaaccctggaggcggaggttacagtgagctgagatcctgccactgcactccagcctggtgacagagtgagactccgtatcaaaaaaaaaaaaaaagaaaatgacatcaatatgggggcaaaaaatccctagaataagtaatgaaaactcaggacaggtatgtcctaaacagatggtactcatcaagtaagtactcatcaagctgacaccaatgtacaaatgtctgcactgggcaaaaaaaaggagagggtagcattaattctcattttctccatataacaggtttaacagtaattgttatttgctaatttcaggtatttccaaatacttttgtgatctggaaaaaaaattatatgtaaacacatgtcaatcttttaaaaattattataatcattatcttcagaatataaaattgccctagccaatcctccgtgccttacccacaagaaaactaaggcagaaagactcatttttattaaatgaggacacactgtatgtatgtatgtaatctgcttttatactcaagattacacactgaagtaatctatcattagcaaggcctttagtttgagttccaccaacttggtagcagtctggccctctggcaaatcatttaccctaaccaagcctaagcttcttttcatctgtaaaatgggaatggcaactgactgttcagaagattaaacgaaacaacttaagcaaagcactgagcatgatccctggcacagagcagccctccctaattgtttactgttcttataagcattttctcaaatcaaagattatttcatgcatgatttttaatcgctgtataggatgaatattccataatgtaattcaagaataccacttgaatttcttattacaaacaagactgcaatgctgcacatgatgctatagataaacctttgactagctatagataaacctttgactgccctctggttatttccttaggaaatatttctagaagtgaaatgagagagttgaaccatatgtatacatcttcacttcaataaaaaatatataatttcaaactcattgaaaaaaacttcaaaaacagatgtagaggaaaagtgaaattttctcctcctccctgcaaaatcagcttcatggaagacaatttttccacggaccagaggcagcggggtatggtttcgggatgattcaagtatactgcatttattgtgcatttcatttctattgttattacattgtatataatgacacaattctacaactcacaataatgtagaatcagtggaagccctgagcttgttttcctgcaactagacagtcctatctgggggtgctgggagacagtgacagatcatcaagcattagattctcataaggaggagcaacctagatccctcgcatgcgcagttcacagtagggtttacactcctatgagaatctgtgccgctactgatgtgacaggaggtggagctcaggcagtcatgcgagggatggaaaggggctgtaaatacagatgaagctttgctcactcacccacagctcacctcctggtgtgcagcctggttcctagcaggccatggaccgctcctggtctgtggcccggggattggggacccctggtttagaacgtatctttccagacctttcataggcattttgtgtgcatacaaaaggtagtgcgcacaaataaagttgtttttgtttttacttttaaatgagatcatattatacaaattgttttgcatttgttttttacttactatttcttggaccacctcctatggcctatacctatggactgacaggtacacacacacacacacacacacacacacacacacacacacaccttttctacacagtaaggtatgccactattaacttaatcatttttttatttgatagaaatttgcagggtttcctgttttcaccattagaaacaacgctgcctttaaaagctgtgtttccatataaatcttgtgcaaaaagaaagtctatctgtaggatgtatttctagagtggagttgctgggtcaaatgaggtacatatttaaaattctgaaactgtttgccaatttgtccaatttactctcctaattaacattgtataaaatgtccaccttcaaccctggtcaagactgaatattattttaaatttctgcccattcagtgggcagggaaaaggtatctcaatgctttgatagtcacttcatacttttccctcatttgcttctcttcttctgttaactggtcgttcatatttcttgcccaaggacttttgttattcacttctttatcaaggatagttaatactttgtctattgtatgtgttccaaatatttccttccatctctgacttgccttttaattgtatgggttttttttttaatatacaaagttttacattttgagatgttgaagctctctatctttttctttatggcttctggatttttttacagcttcctgatgaagccttcccattccatcagcataaaaacattcgtctttgaaatctttttagaaaacgctgacaatagtgtatataacacacataacacacatattgctctgtttcctatacaaggatctaaattttaactttggaaaaactgactgatatggacaatcatttctctattttctagctataataaactgtaaagcattgaatttattcccttcaaatcatattaggaaattagacaacctagcttacatctaggttgatcactggccattcagcttctcaatgtgaggaacgtatttcagattaattcttcaaaaactgaaaaaactctttaagaactcaaaaaaattagccgtttcccccagtcagaaaccctccttttcacacaggcatcagcagacttaaccttgatatagggcagtaaatttgctaagtgtaatcttacatcagaatgttatttataggtaaggcatctgagggccaaagaagataaatttttttaaaccaggtttaagatgtgtgcatgcatgtgtgcacatgtgtatgtgcatgtatgtgtgcacacatgtgtgtgtaggggaaagagtgggactgagggaaataggaattgatgggaggaatatgagaaggcatggtggaaggtttcccaggggccccgtgtgagctggcccatggggacctgacaaggtgccccgccaagacaaaatggagagtacattttaagtggaggacaaagcagaagaaaaggaatagaggcaagaaacccagagccatgttcacaactggcaaggttaggagatactggttcctggcacaggcatggtcctgacctggccggctggccacctcatggttccctgaggagaaccacttgcctataggccctgagggggaacattccccacccaactctacctctgttgtggatcatgccaagaaaggattgcccactgatgagatgattgggattcagacaattgttcagttagtagtaaatcagtcattgaaaacacagaccgagtgaggccatgaggcagcagagggaggagctccacggaggaccacagccctcaaatggccctcaaatgacagtgacggagctccccacttcacctccctgagcctggggttctgctgtaaactgagggaagcttcctccattgtcttcaaggaattttccagaaggctctaaattctaagagtctatgactcaatttccatggaacagaacatacttagagtcctacttttctcttttgtaacaagagaaattcttggcaactgttaaagtcaaggaaagcaaaccagagtgcacatcagctgactaatgtgcctaaggcaattaagtcaaaatatttttcaaatagtactgaaacagctcatctcccattaacaaatacttctagactttccagacttgtcttgctcagcccagctgtagaaacatcccttatgtgtgctggccattaggtggagagtttccaacctatgagaatgagctgcagatcagccgcacctgcatgtgctcaggcaccagaggacaggcatcaacttggcctcctcagcagcccctatctttcccccacctactgccaaacagtacagaaggtgactgtgaggctgctcctgctcaggctgtgatggggttgaacttcatggggctctctatcccagtgcttcattagttcttactctgtacaaacatcacccaagcaccacttctcagcctcactaagaatcttgagtctcccaccaagtaccatatatgtgcttcaggcaaccctgtgtggtcactgttgtgcccattcaagtctgaaaaactctgaggctgactaaaggacggaaccaaaggagagactgaatgcaggctggcccttcacaccactctgctctaggaaaactaacacagcctcatgtggacaggaccgtctctggggttcctgttcgccagcaacatccactctatcttgtttcagtattaagcttctgtcactttaatgcatattaatagatgtgtttgtcattattaaggtggaaggtggttagattctgaagggaggtgagaactgaataggtcctggggtgcaacacaattgcacagaaaacctggttaagaactcaaactctgaaattaaacagacccagctttggattccagttccacctcttatcagtgtgtcaccctggacaagttacggcaaaaggcctctttttccttacatataatgcagataatagtgcctatctcataggggctgctgggagaattaagaaataacacttaacatatgtaagctactataatcagcatccacagcaggtgtgagcacatctttttatccgtgccgactcagcctgtggactcaccggcatgttatccgggatcagacagcttgtttccagccttctctaatcaccagcactggactgtcctgactgtctgactttaggtttagttcaggcagctgtgaccattaagaatgacacaatgacaatgtaaaaatatgtactgtacatatacatcgtaatacaaaatgaaaaggcagaatttaggatgatgtacatcacctaggtaaatgaacacaacaggatcctaggaggcttatagagactaagtattaatagttggtgtttcgtggtgaaagagttattggtgtttgatttcagtgaaaagctgatgaaaaaggatcttttttaaatgagagctgtggataagatctgtagtttcatcaacctcttttttttctgtcccctccccatgttggccacatgtttttcaatattcttacattgtttaccagtaaactgattaattctgtgtattattcttccatttcaatactgatccaaattttaatcaacaatccatatttataaggggttcataatgacattataaaaatcaagtcactgccacaggtgtgataataagcatagctgagcaagcaagaaacaatcagtggcttcatttccatagtcaagggcactcacattcaaggtcaacctcattctaaaggtagtgggaagtgagacctggtaccagctccagtaacaatatctacagttagaccaatcctgtgtcagaaactcctattatgtcatccacagccaatcagaacgtggagtcagcatgaaaccttccatacagggttgcaattccaaacaaaagcaaggaaacttgatggtttgggtagcttttgtatgttcatcctgggtaaaagcatagtttctgttaagccttttcaaatgctgaaaatggtccctggttcccatgggttcctttgcagatggcatgagcccaggtcagctccacctaacagactgctggtgagacaactgatcatccctaatcattaccttcttaatcacagttctaaaaaggcagaggcatttgggattgagggaagggttagtgtaccagaaaatcctaggcaacatcttcaacacacaaatgacccagctcacccctatccatcttgaggcttatcatgattgtggagtttcacaactgatggattggaagacatttttttaattccccagtcatcataagcctatatgtgcacaaccacacacacaactaccccacccccaaacacacacacataccctgccccggggcccaccctggaactgagattcactggtgtaaaacaacttggaccattaggaatgcattacactttaaaaacacacatgcggcctggtgtggtggctcgcgcctgtaatcccagcactttgggaggccaaggtgggtggatcacgaggtcaggagttcaagaccagcctggccaagatggtaaaaccccatctctactaaaaatacaaaaaattagccaggcgcggtggcaggcgcctgtaatcccagctacttgggaggctgaggcaggagaatcgcttgaacttggagggtggaggttgcagtgagccaagatcgcaccactgcactccagcctgggtgacagagtgagactccatctcaaaaaacaaacaaacaaacaaaaacacatgcatacccagaaagagacaatggaatcacgaggaattcaggtggagatatagtaccagttattccctggcaccaataactagttaatatagtctacacctaccttgcaaggcaccatgttagaggcaagtgctttctaacaggctattgctgtgtaactacatcaaagaagggcaagtctctatcaaggtcaatgaactcatttaaaatatctgaagaatcagaaatgggcagctgcttccatagacacagggcacagtgagaccatgtcctgctcctgatcttcactacacatgcctgtactgtttgcccttgagttgtggccttacctcctgggacgtggtcctaaccccccaactcagatcctaggtacagagctggcccccgccagggcctccatggacgcccattcctgaaggtctgttccattgctgtctaaaggccaaaagcagagcagaaggcagaaataaggggtaaggaaaaaaggcaagtggaataaaaaagaaacgtgaatgcataaaggaacaagaaaaaagtgtttctcagcagattggggaaaataagcacaaggagcatttcataaccagaaatacaagtacacagcatggaaccacaccgtctaatctaattctggaggtgctataaacctgatggctgtattggggctccatttgacatttcaaagaaacaaacgctgtaaaattgtgatcttgatgtttttctgttcacaggtccaatatctgcctaacagcagtatcctgtctttccagatgattagcgttgagtttgttgttgggtttttttcttccagcttatgtgagtcctcagagagcactgtctgccaaagcaaaacgccaaaacaggagcagaactttctggccatccatgtgcaattaggagcccattaaataccacccagataactcaacacccaaaatcatcctccatggcgcagctgacagctgaggctaactggaaaaaacaccagctcaggagcagcctcactgggtctggatctgtcgaatgaggaccatgatggtaaaaccccacccctcagcttgttgggagaaagaataaatgggacggcacttcatacactgtcaatttaggcagtgacagcacaggaacatcataattaaccacactgctctctccccatggatctttatgatggagtaaatgacaccaagaaatattaccacttgttctcaaaatatcctattgatttggcagttactctatttaaatacaaagatacaatggttatttatttcttcagaaaatacaggtattttttttttcctccaaaaacattatgattgccattttaatttctgtggttaaagaacacctttaggtactgggcagcgcatgacccagtccagtaaagtggcaggaattcttggaaaaaagggccatagagatccaagtcaaacgcagtcctgatctgtgaagatgtatcagagggaccctgaaccaacaagaacaacaatcaacgtttatgactgccagccctctagctaatcactttaccaacattataacactatctcatctaagcctcacaattctgccaggtaggtactatcatcatttccacatttaatacacgaggaaaaagaaagtggtttaggcaactcaccaaggtaacaaagctactaactagcagagctaggactcaggttccaaggccatcctcttaaccactgtgtggcactgcctcatgcggatgcttccgttgacaaaccaatctggagccaacagaagctttctgcaggtgctctgtgctccaagaaagtgttccatccactcagtacttactgagcacatcactggaaagacaaagactttcaccctatctacccagggggaacatcaattctgggggaccttgagtgtaatgacaactcaggcaagcactgaaaggtgcttttaaaaagtcacagtaattcacagaccaggctataaagcgcttttgtctattgtgataggcccctcaaaacttgtttggggtaaaaagctgcctattagggatatatgttccatactgtgaagactttcttacaaaaagtaaaccacagtttacagcaaaaagaaaccagcaggcctaggtcatccctgagtatgacccatcctattctgctcctctaattcattgctatacataagtaaatgttctactacaagtactaaaatcataaaaactcccaaattctgcacatccctttttgagtgctatgggaatatatttccatctttagggaagttggttacattagcctaggactttaccgagacacaaacaagctatatcagatgagctttcctatgaaattccacctgtagcaaatgttcatccatattactgttacctggtgactttgttgatgactctgtcttcccctttacactggccaccttgggcacctgcaacacagatttttccctatgtaaactcctccttgaaatagcaatctaaatagcttaaggtacagccggctctccatacccacaggttccacatccgcagattcaaccaactacagatcgaaaatattcggggaaaaaaaaatacaactaaaaaaaaataaaaattttaaaaacaatacacaatataacagctatttacatagtattcacatcttattagatattacaggtaatctagagattatttaaagtatatatgagggctgggcccagtgtaatcccagcactttgggaggctaaggcaggaggatcgcttgagccccaggaatttgagaccagcctgagcaacacggtgagaccccgtctctacaaaaagttttaaaaattagctgggtgtgatggctcacgcctgtagtcccagctacctggaggctgagtggggaggatcacctgagcccaggttgacactgcactccagcctgagcgacagagtaagaccctgtctcaaaaaattaattaatttaaaaataaagtatatgggaggatgtgcataagttatatgcaaatataacaccactttatacaagcgacttgagcattctctgattttggtatctatcagggatcctagaactaatctcctatggataccgagggatgattacactacaatacaggaattaatttaagaataacacctagttaaagataaactcttatttttccctcaatttattatgcacacaaacatttggagttagctatagatctatggctctcttaatttcacaatttattcactgttaaatgtctgtttgcataaacattttaatgtaagccaaatcttgacagttggacacgtggaatttgagctctgagagtgaaggcaatgattgaatattccggacttacttgtttcctgtcttataatttgcaaagtggtgcagtactcagattgacctcagggagcttagagaggggtgaggagcgagacaatcacataatcaatgcaagaactaggaagtgatgtgaagggcaccaagagatcacagtcagcagggaaacctgatccgttttgaatattaatcacagaagggccccctgaacaagtgggcattgggctgacatctccaggatgagtcgagctggctaagtgatggcagcgtgggcattccagaaacaagaagggtaagagtaagggcctgaggcaggcgcagagcctcatgggggaatctgaagcagcttctcgggggtgagtattatacacacagtatgagacaggagtgcggcaggggctgggtcatgcagtgccttgaaggccacattgaggatctagtttttttcctaagggaaaggaggaacaagtgaaggcttattgtatgtggtctggagacaggtatgcaggtgaccagatgcgtattttgaaaagctttttctggctgtagtgtggaaaataaactggaaagaggcaagaaagggttcaggaaggtcagttagacaataacaacattttaagtgagagacaatggcagcccggactagcggggtggctgtggagatgggtgaagggatttgagattaggagatgaaatgcatggaacttgatgggttgcatatgggagtaaggaagaaggtgttcttaagccctaggttttgggctacaagactgcaaggacaggctcccattcaccaagtctgggaatttgagaagggctgggtttctgggaacatggtaggttcagtttgggacattttattctgagatacttggtgacctcccagtgtgagtatcagaaaggtgtttaaagttctggttcagtaactgatactattacatgtccacccagataggagactaacagttccttacaaataacctacaaccagcagaaaaataacctgttgaatgacgaagtattttcatcactgttaaaagtcacgaacttctaacaaaactgcacaagcaacatctataataaaaacaatttcagccaggcgcggtggttcatgcctgtaatcctgagactttgggaggccgaggtgggagaatcacgatgtcaggagttcgagaccagcctggccaacatggtgaaaccccgtctctactaaaaacacaaaaattagctgggcatggtggtgggcgcctataatcccagctactcaggaagctgaggcaagagaatcgcttgaccctggaggtggaggttgcagtgagccgagattgtgccattgcactccagcctgggcgacactgtgagactctgtctcaaaataaataaataaataaaactaaaataagaccatttcaaaactgtctgtgtaagttcaattttttaaaatatatctttcaagagaaagttaattccatctactattcaagataaaaattatttaaattttggcattctaatttaaaccaatgtattagtctgttctcatgctgctttgaaggaatacccaagacttggtaatttataaagaaaagaggtttaattgactcacagtttcacatggccgggaggcctcgggaaacttacaatcacggcaggagacacctcttcacagggtaacaggagagagaatgagtgccaagcgaagggggaagccccttataaaaccatcagctcttgtgagaactcactcactatcacaagaacagcatgagggtaaccacccccatggttcaattacctcccaccaggtccctcccatgacatgtggggattatgggaactacaattcaagatgagatatgggtggggacacagccaaaccatatcaaccaggcagcaaacaagaaacttcaaaatggagaaagaaaaataactgttccttaaaatgagcaaagcagggtctttgcatcacctaaaaagctcactgataagcaccaattcactaaaaggtttgagataactgtaaaaaaaaggaattagcttttattgaagatttatgtcccagacacttcaagacacccctcatttaatcttcatggccctatgaggcaagaattatgcttccattttctgaataaggaaactgagtcagagaaattgaataatttgccatggcataactactaataagggctgaaacagaaatcaaacatgtctagacaactccttttaccaatgcccaagacaggaaagggacgaagctgccatttccttggtgccagtcttctgccttggaggtcaaataatgggatgtttatttccaagttttttctgttattacctgcaattaagcagttatgttcttagtcttgaaataaccttaatttttaaagagctgtctttgtcaattcaatcctctctgcttcatcttcttaaaagagttttacctagacatataatcataccccaaagagctttgtaaatttagttataactgttcgcagaatttagatcaaaatgtaaactgaaacctggaaaatacaaatgtttgttttctgtcaaatgcttactgcatgtttccaacccaaatccactaaaacgatgaataaactaagcttaacttacaaaaaaattttcaaaagcaacttattttcttaaggaaataatgctggccaggcatggcggctcacacctgtaatcccagcactttgggaggcagagacaggcagatcacctgaggtcaggagttcgagacgaggctggccaatatggtgaaaccccgtctctactaaaaatacaaaaattagccaggtgtggtggcaggcacctgtaatccctgctactcgagaggctgaggcagaagaattgcttgaacttgggaggcagaggttgcagtgagccaagatcatgccactgcactccagcctggacaacagagtgagactctgtctcaaaaaaaaaaaaaaaaaaaaaaaaaaaaagcagagaagataagagaagagaaataatgttatctggtaagttccttaccaggccacaaaaggttaacaacttgaattgttaaataaggactctaggtgtgctaacaggaaatattacaagtccttacagatggtaagtatatgcactgcctagaaatgcataaatgaaatcatgataaatgagggggaaaatacaaactagtaagtacactgattatacaatgtttaaaaatgtaaatgaatgcctgctatggtagggtcatatgaagcttaactttcctctatgatctttatatatacagatgtatataagtatgtgtatatgcagatgtgtgtgtgtgtgtgtgtgtgtgtgtgtgtaaagctctttgttaataaatgtttaaaagcctattcatcctccaggaacctaagataacagcacttgtcactgcccacccacgggccagcccacgacaccctgtcctggctcagacactgggcaaggtgactgaggggacactgaagaggaagagggtggaggtggagttacgaagaggagggagcaagcagggctgtcctcaggcaggtcagacaggcgcctggtgcagtagaaagagtatatgcttccaactcagactgacccctctgagcagtcaaactctagctctgcccctcaccagctgtgtgacctcaggcaagtgacagaaactttctgagcttcaaaatgagaaaaataaagtctacctcctagcatttgcatggggaatgaaaggaattctacaaaattcctggcataagtgtctgtctccttggatggctagtccctcttcttccttgatcggtttagagtcagttgcctggtcgatgaaggggaaagcaaggcaagagtaacaatagggtattgtggggattaaaggaagatgtatggcaatggatctgtcaactgcagccctgtacaaacactgattattaatgtactctgggactctggagtaataggaataacttcagggctgagcaggtcacatgtgaaaaaatttttaaacagcagcagcatcattggcagtattatactgctgcttaaaagacttagaattttgtgactcagtgcttaaaatgacattcagaagaaaaatagcctcaggccaacagccgcaatccttcaccctgtgcccaggctcctgtgtctgggattcagggccatgctgaagccagctggcctccagatgcagtgacaaatccagggaaagcatttggggttgtcagagctcatggagtgactgctgaggggtcggttcatgcgtctggaagacagttgggaactactgtctaatgtctggcagctaggttcagtgctgagctcagaagccgaccagtgagcaggaagatgctcagttctgctttgaactgcggccaagaggccaagcggtaatttcatctctcctccagttcttgccgcaggaaaactgacaataaggaaaaaacagatatggctgggtctctctctcaaaaggacactgacaccaaagtcctaactcctcaagaggtccttcaaacaaatctatcaaaatctgtgaaaagaagcctcactgaattccaagatcccaaagataattgttactcctaaaatttgttgtagtaaaaataacagcgggtctcagctcaagtgtcacattctcagaaagaccttcctgactacctcatcctaaaagtggggcctcctcatcccttattatctttctaaaattattattatttttttttaaaggcaggatctcactctatcacccaggctggagtgcactcgtgcgatcatagctcactgcagcctcgaactcctgggctcaagcaatcctcctactcagccttctgagtagctaggactacaggcacatgccagtacacccagctagtttttcaatgttttaaatagagacagggtctcactgttgcccaaactggtctcaaactcctcggctcatgtaatcttcctgcctcagcctcccaaagagctgggattacaggagtaagccactgcacctggctctctctttatttttgagaacggtactgtctgacattgcctacctgttactttttgccccacaagaaaaatatgctgtatgtggcagaaagttaggtttattcactgctgtatcccaatgctggcactgaaatatttattagtttaatgaatgaatgaaggaacactgcacataatacctaagtaacctatttatgtcctttttagaaaattccatatagttcagaagaggaatgtttatagttgagtatattttacaagttgagcatcaggttttagcttccataatgtaacattacagcactgttgctataagaaagtgaaatctaccttaaaactcagatgtcactattcaatggtatcctttccaggaacaaaagccttcctgaggactataacatggtaattctctcctccacggaaccactttgtataaggttgtttctgctgggaaaatacatttcttttaggacatggaaaatctaatccagttgctgtaacaaagaaaaggatccttccagaaaagggaggaattactacttctgggtggtggaaacttgtcatatcttgatcatacaaataaaggctcctctgcaggatgtgatctaccaggggtttggaagtagaaatcaaagggctgttgccaccaagaggactgcagtttcagacctgtggtgccagggcctgcctctgaaccagaatcatcctcctcccagcctgtgagaaagtacagcaaaggacttaaaagcaggacacaaatccaacatatgcagttttcataacgtactttgttaaaaacatgtattctcaaattgtgttacacataatacaggcacgcaatgcctccttcataactaatgtaaaaaacaatttggccaggtgcaggggctcatacctatgatcccaacacgtttggaagccaaggtgggaggatcacttgcggccagagtttgagactagcctgggcaacataacgagatcccatctctaaaaaaaaaaaatttttttttttttttgagatggagtcttgctctgtcacccaggctggagtgcagtggcacgatctcagctgactgcaacctctgccctccaggttcaagcgattcttctgcctccgcctcccgagtagctgggactacaggcgcacaccaccacacccggctaatttttgtatttttagtagagacgggatttcaccatattggccaggctggtctcgaactgctgacctcgtgatccgcctgcctcggcctctcaaagtgctgggattacaggcgtgagccaccacacccggccaaaaatttttttaaagataaagcaatttctctaaaaaattaatttcaggccataaaaacccacaaggtcaaaggttaaacccatcttttgactctcaggggaaaaaagcatatgaataaccaggaaaatgaatacagagttggtacagctttttcaataataaaaataataaaactgttattagacaaaaatgtcttcttcaaaaagacccttgggggaaacactgggcctcagctcctgatgtgagtggggaggtgcatcttttggaagcactactgtcaggctgtacaagtctcaaaatgaggcctggctggcaggttccagctctgctaatcttactgaggaacaaccaacaagggacattcccagctgaacgctttaacactcaagggaaaatggtgtctgtaacagcagcaaactttctcttcaaaactttgcatcttattttaaatgaagggttcttaacacacacatgcatgcaagttttggtctgtgtgtacatgtgcggatttctgcggagagagttcatagtgttcagagtcctaaatggtgactatgtcccaaaagaagttaaaacaccacttttttttttttttttttgagatggagtctcactctgctgcccaggttggagtgcagtggtgggatctcggctcactacaacctccacctcccgggttcaagcgattctcctgcctcagcctcccaagtagctgggactacaggcatgcaccaccatgctcagctaacttttgtattttcagtagagacggggtttcactatgttggccaggttggtctcgaactcctgacctcgtgatccgcccgcctcggtttcccaaagtgctgggattacaagtgtgaaccaccgcgcccagccaaaacactactcttttaaagggtggcagaactttagcctttggattattttgggaaaccaaagtttttctgagctgcctctaaagatttctgtcaagctgggagccacttggggtcaaaaaccttttcccaagaaaaatcctaggaagcctgagaactaacacacaatcctgatgtgggtgtgggcctctcgtatctttggaatgcctaacccgctggacctcaccgctcaaacagcccctgacgtctagacagcaggtcaggaaggtcttcacttagggtttggattcttgaatttgcctcgcactcatggatgttgacattgtccagagcaggctttgacatttcataagttactattttttctcagaaatgcattattttctccagcttcccaagaaagatcaaaattaatgctgagtctttgatgcttcagtacatcactccaaatgcagggtacatctccacagaaactttcctcccaggcaagcttttttcttcaactaggcatttctacatcaaaatgtaaccctttagtcactgttcccactgtcccctgccccctcaacaaactgtatcgcagctatttaaacatttttcaacatcctgtaagaataacacgtacatttccccctcctgtttaaaaaaattatttttttctctttgttttgacaaaatcctgttctctagttgctttttcaaatatggaaatttaagcatgatacaaattacatgaactctctactccccccaaccctggctgctggacctgttgtgatcacatatctgtttctacaagccacagaagaaagtgaccttgttactctgaaaatctcactttcattccaactctaccccattaccaatattctttcatacatatggcaattttgggcctttcttcaaaaatgtgaccaaaggtacaataaaatgaaaggctgaaaaatgactgctttctgcttgctctcctgaactacaatcttcttccatcattttttttctaaaccaaaaggtaccagtctatttggaaaataatcagttttataaaaggtacccttacactattatttttacaatgactacatgtatggcaggagaaattacaatctgctgagaaaattgcaaaataatttctaactctatttgctataatttgacaattctatcttaagagtctagaaaatataccattgtgaaatgtctcaaacccattatcctaattgaaatctatttaaatggaatagttcctttgcaagtcacataaaagcacatacagagcagagatccttcctattaaatctagaaatgctatgcctataaagtacatgacatctaagcagtaaagattttagcctcaaaattccttaaccatttgtcatcgtgtatgtgaacgctcatctagagaccttcacctgctgccatagatacaaaatcgaggattgaacaatgcccttaaaaagtaataataataaagtcaagaaaagcagacatattatggtcatctagctagatttcactgcccagtttttattctccacgtttgttttctttttaatacgatgaacctttttcacttttctgatcctaaacctttgactttggaatatactgcatattttggtggtgttccattaaaatgggtctgtgtcatagggatacgaaccaactggacaagacggaagggagcccccagcacaacagagagcaaaggaaagcccgcagacagctgagagctaaagccattactgcctctgtatttaaaatccacagtgctgactcttcattaattttagatgaaattccacagtaggttttctgtaattaccaacagcttgcattacttgctcatgagatggctctatcaataaagagatccggtttcttaagcagagtctcccagatcatacgcccaccttcatgtgaggacgtgtgctgccaatggtctaagaagtcctcagaagcaatatggaaaggagacctttctccaacaccctttaagagccagatccctgacctcctcctgagcactagaggctgaaattcagaaaggaagaagcttaaatggccaaaggcagaagatgaccattcttgactctaaatttctgctaacagggatctgctgcaatcatgcatatttgtcaccagtgttgtcctttttttgacagagtctcgctctgttgcccaggctggagtgcagtggcatgatctcagctcactgcaacctctgcctcccaggttccagcaattctcctgcctcagcctcctgagtagctgttattacaggtgtgcgccaccacagctggctaatttttgcattttttagtagagacggggtttcaccatattggccagtctggtatcaaactcatgacctcgtgatctgcccaccttggcctcccaaagtgctgggattacaggcgtgacccaccacgtccagcctaccagcattgtcttaaatattgggctgccccctagaagaatggtctttctgaaagcagcaacttctgtctttaaaaaaaggtatataaaacaatcatactttcatgagcagagcccaccatcacaggacacacatgatgttcatgaggaaaggaaggagtcagtaacaggcaacagcagatgtgtgttctagaacagctggaggctgcacgaggagaaggctggacttctgggctaaaaggggtaagctgaggccctaaggccttccaaggaagggcaggatccaccttccagagtcacagagctgggaggaccagcctcctggtgctgtgtctacgtgagggacccccttttcttgctgcagataagaatcaccagacctaacagaaaagccaatgacggggaacagattattcaggatacagaaaaataaagaaggcggcagctgggcgtggtggctcatgcctgtaattctgtaatcccagcactttgggaggctgaggtgggcagatcacctgaggtcaggagttcgtgaccagcctgaccaacatggtgaaaccccatctctactaaaattacaaaaattagctgggcgtggtggcaggtgccagctacttgggaggctgaggcaggataatcgcttaaacccaggaggtggaggttgcagtgagctgagatcaggccattgtactctagcctgggtgacagagtgagactctgtctcaaaaaaaaaaaagaaaaagaaaagaaaagaaagaaagaagaaggcagaggaggaagaagaggaataaaagaggcaaacccaagaaaaataaaaagatgccctgtgaaaattcagtagggttctggtcaaaacaaatggactaagaaaactgaaggagaaaatatcctggcacaggacacctggctaggatgacgtgtatctccaattctctccctcaaaggtcttctaggatttgaggggagtggggctagcagtgaggaaagagaatgtcagggctccagagatgatctggtttgagcagtgaggaggcggccaggcttgcgcacggatgccccgcgcggggagcctgcagttcgctcaccggtgttgtctgtgctccaggttcttctaccgtgaattggtctctccattctaaaaagctggctttagagctttttagatgagaggtatgagagatttagacctgaagttcctctttaacctttctcagttgcgggctttttgaaagcctgatgaacatcaaagatctctccccaccacacaaatatacatacacaaatatcctcaagattttgcacttgattttcaaggagacacagatatttctcttccccctccccaagattaaaaaacccagatgtacagaattcattacactcttttgaataggaggagtagggttttaatccacattcctttggatggtgagtgcatggtcctagggcatttgggcaagacagagacagcatgtgaaatctcactccaggaagaagacagccttctggtgcctcccaaagctttgccagcaattttactcctggaaccaagactgtagtgggaaaacggctggttactttctagacaataaataaccaatctattgaaaaacaaactataactgcaaaacatacctaagtgctttatgttagtgagagaaagaataagaaataatcaaagaacaagagagaaagacagaaaagaaaaattggtacactaatttataagctattaatttgggagaaaagaatctattttataagaattttccatgcttaatgctacttaaagagttaaaatacttgtttaagattcttcaaagaccttccctaaaaggaaacacaagatgggtaaggacctcattttaaagattcacaggaggctgactctcaccagtgtctggacctgcccagtgacagtccccaagcatagccactgttttctaagcagtgtcatctgctgaatgctgaagggatcactggataaccagtccatattaaataaatgcaggtatagcctattttataagccttttatcaggcctcaaagaatttggcttgaaatcatcccagtgattagacgagggttcccatgccagatggtaggcttcctgcttgtctgtcagggaccctccctcccttagcagtagcatcacacttgaaaagatgtccctgtgtacccacattgacagaaataagaactaaagggctggccaggcagggctcacccctgtgatcccagcactttaggaggccaaggagggtggattgctggaggtcaggagttcgagatgagcctggccaacatggtgaaaccccatctctactaaaaatacaaaaatttaccaggcctggtggtgcatgcctgtaatcccagctacttaggaggctgaggaaggaggatcacttgaacccaggaggcggaggttgcagtgagccgagattacgccactgcacttgagactgggcaacagaacaagactttgtctcaaagaaaaaaaaaaaaaggaaaaaacataaagggctgaccccaggtacctgcccccatacctactgtttactgctgtaagaacaggaaagcaaaacctctcattccaactttaaatactgacttaagcacttgtataaatgagctcctaaaacagaaaaacatcgttcaaaaaaattccttttttccttagcttgaataaagcacccatctcactcaacgttaaccaatcgacagtacagcctgctttgtgcttacttagcagtgtgtagggtgagaggctaggacactccactggagcactgtgggaaggagctcaggaggagctggaaggcagttctgagagggaaaacggaggctaatggttcagttctgtgacagatcccacaaaatggctaaaatgcttgcagaccataagaaagctaagttttagaaatagtgaaatttgcaatttctggaaggcttctttggagctgtgggtcaacaaatatacatatattaaatttgttttcaattgtattttttgagattaacactttggcattaaaaaatcatacagacttctggaaggatctcttaaccatccaccccagaaaattctgggccctgcacttgctacacttgctgccaaaacaactctatcatctaactgaaaaactaaactcaagatgtgttttttctcttccctaagattttagtacctcctgaaataaaattcacttcaggctattaggcctcctctgaacaatgatcacagtcagccttaagacaaaagctaggctgaccaaatgagtttggtttctggctcagagcatgatcaacagccatttctgctgggagttttagccttaaaaaaaaattaatgttcctgcttcactattaacctaccccatcaggatcgaataccactcaccgtatccccacagacattagcctaccctgggaaattaaaacaaaagcaattcctttcccacgggttttcagctactgacttatttcccatttcgatcttgcccctgaacttagccaggcaaagaggctcaattcctgagggcagctcctgccaggcttcctacagcagtttctgctcctaactgtaggtgaggtggataggaaactggggtggccacatcagatcagccactgtcagggactaaccgtcaagcagtcacttctaacacacatccaggcactgaggataccaagatggctcctgctccaggttaagtgggagcatttccatcatttttatcaaaggaaacaataatagaaggtaggaaatgctcagccgttagtgagcaactttagtgagcaggtgccagcctgcctgcctgaacaagagttctgtgcttacttcccagccccagtcacaagctcccttgccctctggatggcttttcctcatttgtcatcattaagtccaacacacacacttccctctacctgctctcagatgtaaaattatcagcaaggtagggttagagtttactgcatggtccacttgtaatagacttcaccttatacaaacatctgcatggtctactacacctgccggaggcctactttaaaatctgtctatggaaaataacactgttgtctcggtctggcaggcagcatcctacaacaacataacttgctcccctctcacttttttattttttttatttttgacagggtctcgctctgttgcctgggctagagtgcagtggcaccatcttggctcactgtaacctctgcctcccaagctcaagcaatcctcccacctcagcctcctaagtagcagagaccacaggtgcatgtcaccatgcccagctaatttttgtttttgttttttatttttgtagagacagggtttcaccatgttgcccaggctggtcttgaactcctgaactcaagggatccacctgcctcagcctcccaaagtgctggattacaggtgtgagccaccaggcccagatttcccctttccatcataaaaggaaatgctttccaccaggtttccatgatcagggcacacagagtaaattacttacaggattttcctttggggctaggtgcaccccatagtactttgctctaactccaatcctaacaaccaccagatggtatttgcctgcctgtgctgttaaggtttccagcacatggggaatgagctgttcacactcaggcatgagcttacagataccagagcccctcccttaatggtgttcccaatcagctttggtgctggtttccactcgagagttccgaggcaccactttggtacctagaatgctactaagtcacacaggtctcctcattatccgattctgtgattttcctgtaggcttttctctaattactatacattaatacaaatttctaattaatataaagcttaaagccttcttaacttgcagtctcccagaaaacgcatcactctagtcttcacaaaacatcttctctctggttaccagaggtgctggtctggggaaccagtcccttccttccaaaagaacattatctcggcatcaagtccttcgatttcctattcgtaacttcaaagttcccggggaagacccaggtttctcctttttccttttgacatgtcaggtggacctgatgagcactggcaggctcccccactcatctggaagtagccctcaggaagagagagaagggggaagcctccccatctgcagggtcagttctaaacacaactgcccagcttctttccaacagggaatccagcaacagcaggaagcctcccctgcacaaggtacaaccagaattccctcttattactgcctagagccctctttagtgtccaccaggtagtaccagggtctactcagaaacacttggcaaacacccccgacaggcaaagtactctagtttgctgatggcagtgagggaggtcagagggaggagaaaggtgcaaatatgagcagggcagaatccctaccctctaggaagagaggaagactactgcacccctggctgtgggctgtatatggaatactccaaccttaaggtctcaaaatggagcctcatgtcagtgtctcctgaggctgggtgcagaaaacccatccagacaagaggatcagcctcaaatcccatccttccaacatgatgggcaaatgcctttcaagtctgggacaagggcatggaacatggtttctcagaacatgtttttgtaggatgctccaaaccctctgtacagttttcatgatagatccctgtgaactctttccccccatttcccttcctgggttattctctaaaaactacttaacctctccaataaatccaagttgtttttgtctgtttttgaggtgtcacccaggctggagtgcagtggcacaatgatggctcactgcagcctggacctcccaggctcaagcaatcctcccacctcagcaccctgagtaggactacaggtgcacaccaccatgcctaatttttaaattttttgtaaagaatttaaagatggggaggtctccctatgttgcccaggctggtcttgaatcctgggctcaagcgatcctcccaccctagcctcccaaagtgctgggattacaggcatgacccactgtgctcagccatataaccaagttttaaagagaagtcctcaagttgagtttcccttattttctaatgtggcttgcattctttcattcattcaccccgagaatatttaagcagcatgtctaatgggtcagatacgaagctaggtactgggtatataacgcggagcaaaataaacaaggtccctgccttcttggaagaagaggaaaagcaggtatctacaacagaatatatagtaacaaactgtgatgagtgctacaaaggacaagagaaaatgggggtgggggtgaggtagggagtacagctgtttcctgcagagggttcagctcctaaaaagtctagctcccttccaactgggaagagaaaggtggccagtgtgcctggaatacaataaaccaggagagacacagaggcccaggctggagaaggcaggaggggctagatcacacagcacctaaacatgttcggaatgtagattttatcccacaggcaacaaagaaacattcagagagtttgagcaaggatgtgacatgatgatgttagaattatttattatttatttgagacagggtctctgtcacccaggctggatgcagtggtgtgatcacagatcactgcagcctcaacctcctgggttcaaacaatcctcccacctcagtctcccgagtaattgggaccacaggcacaggccaccaaacccagctaattttaatttttccttctttctttctttcttttttttttttttgtagacagggtctcactatgttgcccaggctggtgtcgaactcctgggctcaggcagtcctcccacctcagcctccccaagtgttgagattacaggtgtgagccaccatgcccggccatgataggaattttttaaagaccactcagactgctgagaggtgaagagattagaaaggagtagaggtagatgagggcaggtcagtgaggggctgctggagtattccaagcaaaaagatggttgtttgcaccaaactagaacagtggcagagaagcttcagagaaaagaaccatccaagagtcgtttataagataaaaatcagcagtatttggtgcaggactagataagggcgaaaggagggaggtcgagcttgcattcgtagtgaggagaaatgtcaattacctctggcagaaagcacaggctgaacaaactctgcagctcactggcactgcacttccctcggcacctatttttcagaatttctagaaaaatttcaagcccatctcttatttactcctaaatctattcctgaaactgtcatccatttttaacacatttatcaagcatctacgatgctctggggatagagaggtgaccagcagctcatgctctctgcgtctgtcttctttgagcccctgggtgttgcctagaggcagcctctaaaccctcctggcagcaaacacaactcccaaagctggggctcatcttaccttctgaaaccttcatacaagccacttaacagacgcctctctacctcttagagacattccgcaatgcaacaagcagcttgagttcttttcactcagagattcactcctcatttcataatattctgagccccaggagacatcatagcatcaaatcaaaactccccaggtctttgagccttgctcttaaaggaagatcatgagtcccaccaggcagttcttccttctactacataatcaaactccttttctctaaaatgtactgagtttggaacctacatgcgacttgtgccctttgatttgttgcccagattagtttgtgctgggctctatcctatcaccaggaatggtggtttaataaaccctggagctatactgtccaatatgggcacatggaactatttaaattaaaattaaagcttcggtttcagcttaattaaaattaaagcttccaattctcagttgcactaaccacctttcaaatgtttaatggtctgttgtaccatgatgcacagaggcactgctacagggttgtttgcatgtttgatgtgaatttcccctttaaaaaataaaaatgaaattcaacatatagaaactttcgacatattaacttgtgtcctgtttcatgctacaagtgaatactataaattgaacttaaagtaacatatgccactaaaatactgcttcttaatcagtttcacagtttgggctttgtgtaaaattcatttgctaagaatgtttgaaaataacctgtgacttcatcatgggctcataattttatgagccactgtggacaaacactgtccttttttgtttgtttgatttttagatacagggtcttattctgtcaccaacgctgtggtgcagtggtgccatcatggctcacagcagccttgaattcccaggcttaagcaatcctcctcccagctcagcctgccaagtagctaggactacaggtgtgtgtcactgcatctggcttttttttttttttttttgtagaggcagggtctcactatgttgcctaggctggtctcaaactcttggcctcaagtgatcctccacttcggtctcccaaagtgctgggattgcagacataagccacagcacctggcctttaaaaaaaaaaaatgtaccttgcacactgcccagtacagttgctacttagtaaatacatagactaactggtcatcttgaaagcactcttaattttatatgcctacttctcatacacaagtctgtaagaggtttccactaaatgttcatttcagattctgaatttcaactacctaacaccagccctataattatgcagtgtgcaggcatttttttctctagaatatctaccaaatgattttatagtccaaagacacatttatactgtgacagaaaatccaccaacaatgcttcattgtggaactatcttggaacaagattagcaaaagttgataattatcaaaattgagtaatagatgcctgatatccattatattattcttcacttttgtgtatgttttttaaaattccagagcaaaagatattttgaaaaacttagtcaattatatacaaatttgatgaggcctcacacatactttacaagataactataacttaaatatggctgggttcatagcactttattgactatcccaagccagtgacctgtttcatgaagtcctctccttgtatggtcctgaggcgtggttgttcctttgaatggggaaacatcatcaaatctcgctggagatggggttcaggcaggttttgcacacagcaactccgagttgtcatgtttgaccacctggctgtaaggccagtagtctctgtctcctcttatcaggaaaaaaggtgaaagatctgcccgcatccaaacactaaagcaaacaactgcaggcaagagcagaggaacagctgcttccggtccaccttgctccacactcaggactgcacccactgcagagatgcctacaggtagggccaagtctcccaggtacgggtgctgaatgcttagcacaccacagaaagtccaacataatctaccttagaatgcctccatggatacacctactcagctgtcttagttttaccttctgccctatggttacgctacacatggaatcatgggaaatgctgactaggaagagaagctcatccactcgaaatcaagttccccacagccctgagagtcagcaaaccctacccacagtcctttctgtacatgccaggcatggctctcaaggctcattcaaccctcatagcatcttggaggtgggaaagtgaggcaaaagaggttaagaaacttcccgaggccccttgagcagtgtctggttcccaagcttctgctctccctgctacactatgctgccttgtgacatgtcctctgcagaatggcaccttctgagcctgcccttcccatattcccctctctgcccctctgcacagcagccagacatccacgttgctctctctcttgaaatgctctgcccaagacccccagttgctggtttcttccttttctttctttcttggtgccctgttcttttccttcagaggaaggagattttacacatattacaatccaatatatatgatgcatatgtctattgacttgtttgttgtctagactagataatgtgctttgtgcaggaaggaaccacatctgttttgctccccatcagatttccaatgccaagcacaatgcttggccctggtagatgctcaaatacttgctgaatgacgatcactgttcagtcaatcctttcagtaaaaagatttttaaattctctattttgagcctaaaataataaatataaccatctataagaatacagcccaaaagacagcatgaggtccaagaaaggactgaaaattgaataagaaaacaagccagcttatgtcagctttgaacagcaagagaaatgaaacttataaaatgcatattgggattctgaaaggttatttgcaggagcaatccaacgggtaggttttaatctcagatcctaaataagcttatgactgaagccagctcctcttgcccagtgctgctttcaactgttagaataagctggggaggcacttaatgtgtttgttgcaataatcttcttagggaaaagcccttagaaccaatattccaggcaaatccagcagacaaaggttacctggttgtttcaaagcccacccacatttcccattctcccagcttccacacagaaaggttagattcttctctcaatagtcccatttatgctcacagtgacctggcacatggcttttgttcaccaaagaaaagcctttcctttcaaggacttaagtcttctgcaataagagttaattctttaagtttaacaaagttctcccaatacaagtagtccccacttatctgcagtttccgtcacccatagccaaccaagttctgaaaatatcaaatggaaaattgcagaaataaacaattcgcaagttttaaactgcatgccattctgggtagtgtcatgaaatttctcactgtccaatcccatcctgcccaggatgtgaatcctccctttgtccagcagatccacgccgtaggcgctacctactcattagtcacctttagctgtctcagttatcagatcaactgtcaccatattacagttcttgtgttcaagtaacgcttattttacttaataacagccccaaagcacaagattaatgacgctggcaatttggatacgccaaagtgaagctgtaaagtgcttcctttaagtgaaaaagtcaaacttcacaacttaggaaaggaaaaaatcttgtactgaggttgctaagatctatgttaagaatgaatcttctatctccgaaaattgtgaacaatatgtggttgttataaccgttctttttttttttttgagatggagtctcgctctgtcgcccaggctggaatgcaatggtgcaatcttggctcactgcaacctccgcctcctgggctcaagcgattctcctgcctcagcctcctgagtagctggaactacaggtgcacaccaccacacctggctaattttttgtattttggtagagatggggtttcactgtgttgcccaggctggtctggaactcctgagctcaggcaatctgcccacctcagcctcccaaaatgctgggattacaggtgtgagccaccgcacctggcccaactgttctatttttattagttatattgttaatctcttaccgtgtctaatttataaattaaactttattataggtatacatgcataggaaaaaaacgtggtgtatatacggttcagcactatccatggtttcaggcatccactggggagcaacataagccagtattctaggcccagctatcagtccttgaccttgctgtgtaatcttggaaagttatttaacctttctgagcctcagttttctcatcttaaaataagattgataatagtatctactattcatagggtggtataaagtttaaaggtaggaacagtgcctggcacacgattccccgtaaatgatagttactcacattgttatcacctgcgtattgttttgtttttcaaagcactatcacaaacacctgagacttcaaaagtcctgaatacaatcattttctttcaattgtttaatttctcagattcttagaatcataaactcatataatctatgagactgctagcagtaggggatggcactaagaaatcaactcttcattttggaagagagactttttttttttttttaaacagagtctcactctgtcacccaggctggagtgcagtggtgcgatctcggctcactgcaacctctacctcccaggttcaagcgattctcctgattcagtcccaagtagctgggactacaggcatgtgccaccacgcctggctaatttttgtatttttaatagagccaggttttcaccatgttggtcaggctggtcttgaactcctgacctcaggtgatccgcctcccaaagtgctgggattacaggcatgagccaccgcgccctgtcctggaagagagacttttaaaagtccaaattagtgaagtgacgcgcagctggtatcctgccttgctgcccagtgcaattttgggtgatccacgcagccattgggaaatatgtttctaatggtgaagcagggatgacaggtgaaactgtcaggactgtagccttctgactccaagtctagtgttctctccaccccaccaatgccagtcaagggcttctgaactttcatgacctcctagcatccctctcattaatggtgcttcatggacatttcacgcagtgtaattacgcattataaagagtttggaaaggagcaacacaaaatcttgtataacctatgagttgctttaaaactcacatgtaagaatattcacaacagcatgggcttccagtcttcttattacaatatttactttaaacttgggatttaaagttgacaaagaccttaatgaataggaagacaaagggagctgtctgtccatggctcgttagctcctgaagttaatgtttctcacagggacaagagtcagccaaaggatagtgctctaggcaaattggaaaatgttcctccagccacaaaccatggattattgcctaggcgttgagtggcaaatcttacgagatgcttcccagcttttcccagttaaccattcatcctgtcagtggacagcatgacctgttattgggtgctcactagaaccagggacataagtgatctcatttaattcttacaactacctataaataatatactaccctagttcatctaagaccattgactataagacacactgttattttatgtgccaaaaaaggaagccactgctgactacaagtctaagaccccatacattacaagatgctttttttccccaggaatgttaacattacataaattacactgtcttagcattgttgaaatgggaatattttcccactttacaaagaaactgaggtacacagaaagagaagtaatttacccttaaggtcacagagctggtaagcagagcacaaggatacagacccagtcagtccagtcaccttttcatggcagtaaaagatttcccaatagcctcgtgaattactcaaaactgcacttggcagagagacagacatcggcatctaactctggctccagcaggagcacaggagctcattagtgcagcaattctctgaacatctctgaacctgaccactctgaacatgtccactcaagaggacactgcaagagacatctctaataaactgccatttctctccagggaaaaacaacgtggtacaatggaaaaagtgtgttttgtttgcttggacacagggtcttactctgtcatccaggatggtctcaaacccttggcctcaagtaaacctcttgccttggcctcccaaggtactgggattacaagatgtgagccactgtgcctggcccaaaaagcacgttttttgaatcaatgtcctagactgacattcttgctccaccatctaaccagcttgtcaccttgggcaagttactactttgctctgagcctcggtttcctcttctgtaaaatgaggctatcacacctccattagagggctgctctaggactggagaggatatatacataaggggcagaaaacagtacctggctgagttggaactcaacactgctctcttttctatactagtcttctgccttgggacagaatcaaagaataagcattccctgtgacctcagcaattcccaaggagaccttcaggagataaggatcagacagaagaaagcagaccctgagggatattcaggcaaagaaaatgaactagaaacacctagagaacaagagacagtgtgtgtttaatgaacttcctaactctgaatgaatgaattgacaaatggaaaaaaagaaagaacaggcactttccatcaaaagataccagtcaacagacgtgaggattaatataattttatattgaacctgacacagaaaactggtctttgaagattcactttgatactgaaagtaatctacagtgaggagaatttccccattgctctgttctcatattaagtaataaactgtgcagttctcccctctctttcctcaagggattcagaaaaccttccagaaaacagaagcatttgacttgaaggaaaggcaactaatatggcatatagaaacaaactcttcatcctttaaaaacaaaaaaaccctccatcatttctataatgtctagcagtttctggcatacagcaaaattattattattttaataaataatttcttttttaactccaggcaactgctttttgtccaaaacatgctacgtatttattctatcgaaaagcctaatctttcctgcttcttctccagaagcattctaacataacctctaataatgaacattatgtttggtatatgctgtgtctaatcttctctcacgatgacataacttgctcttcagacctccaacaatcagcccaaaccaaactcctgaatttttcctccctcctcgtctgtcccagcccctcggttgcttgtcagtagactcaattaccaccatcttctgatctgaatcaatttgttaatctccttcctctcaggcacagtgccttttactggagataaacatgcaagcaagttcagttcacccagagccctccacatcctctccctccaagccttcacactcccaaaggggcccagaaaaaaaagaaagaaatgatatggcaaaatcccactctatccacatcacctcagggggcttgtttaccataactttagaccaactaccatttttggggagaatctgaaagaatattgtttatgggctaggtaagagctaacagaaatggcagtttcattcttccaatatgagacaagcgtctctgtgtgacccagccctaaaactcacaaacctagactcctcaaactccccatactccagagttcaaggataacctgccctccatttttccttattgttttccatataaaagtcactcgttgtttcccctccagcttacacctggctcctgaaatgactcctctgaatcctctgagaatcctcaaaacatgtaaaagcctcattccttttaatgcatgtgcagagcggtgatggtgtgaagacgctggcacttcaaacgtgaacgtggcacgagccctgccctcaaggagcccacaattttccctcaactctaaaaaaggatgtcctccctggacagtgtctgtaaaacacagtgacaaagtacttcatagctctggagaaagagcgagggtggaaacagactttgcccttacatttgacgcccagtaaccataacaaccgatggtttaagtaactatcaacccactgaggggctaagttttccaaaaatcgttttcaaaaggggaagactcccctgcaccaactcccatggcagccgtacgctctaggcagcgtgtggtgcaatgtggccagccgttccccgccttctccggttccaccgtatggtttccgtgctcagcagccagcagcgacggcgtccacggccacaccgcctccccgcaaggcacctggcgctaggcctcagcccaatgtcacttgttaaccttccgatcccccggatttcggcacgccgccgcctccctgctaaagcacacaaaccaccccaccgccacccgcgttctccaggagttggagaaaaaccaccggggcgcatacaacctctgacagattcgagtaaaagtaactgcggttctcgactttcaagcatttcgcgtcgccggtgaggggggcggcaggaacccggggccccattcataaaattgcaagccgttttcctctagtttgcgcgtgacggtgcctccctgcccggggccggggaccgcaggctgaggggacggggccggcagctcctcccgccggagtcgagcccgagccatccggcggggccccgaaggaagggattgcccgggggtgtcgcgggtgggcgtccccttcaatacctgaaccatgacagcggggtggggggccgagccccgccacgccaagggccgccggacccgaccggtactttgaagcccgcggggtcgatccgcgcccagcccgggccttatccgcggggcgctccctccaccgcccccgcctggccctgagactgctcacccaagatccgctggctgcctcattgtactatgccggcgcccgtgctcccggccgcgcgactccggcttcggctggggcaccggccgcggtcctgctgccctgccgcccgcccgcccccgggcacacgccgccccgccccgccggcggacccgccccgcgcccgcggccgccgccgccaaccagagggcgcgggggcggagcaaacggcacgccaggcccaaccaatccagttctaccgcgcgccgaggtgaggccgcggaaatgggggagcgatttgtcaggtctgttaaaggggccaccgcccttggagctagggagaggagtggtggggagggttacctggaagagccccaggtgagggggacaaaagcttcactctcccaacggggctgcacactgtccccagctctttgcacttcttaatttcctcttcctgcagtctagcagcaacaagtgcccttgagacgagggctgggggttgaggtggggtgactgaggcgcggagaaccaggggtatccccctgggcaaattcactcgatttgcattttagagggccatcagacgtatctatccccatccaactgcagacattgatttaaaaaggcaaattcccagtttcccgcattatgtacttcccccacctgactaccacactaccacatcctatcctgaactaactctgttactagtttttttgtttgagacggagtctcgctctgtcgccaggctggagtgcagtgccgtcatctgggctcactgcaacctccgcctcctgggttaaagcgattctcctgcctcagccttccgagtagctgggattacaggcgcgtgccaccatgcccagctaatttttgtatttttagtagagacggggtttcaccatgttggccaggatggtctcggtctcttgacctcgtgatccgccggacccagcctcccaaagtactgggattacaggcgtgagccaccgcgcctggccacgagttcttagagcttagaacttatatagtattaactactcatttttagagaggcaatatctgaggctcagagaggtaaagtgacttctcgaggtaaattctcacttagaatgagcttcctgggatggcaatgcccattgtgcatttatcttctgcgaacctgggttggctggcagaagcactggcacatagggagagttcccccttcccccgtagtccttgcccctctgcacttcccacccaccacaagaaaggaccaagacaacaaacagatgtgtcagtgtgtctcctgcattagtgggtcccaaatgtcagatcttcaacgtcagatcatcctggagggttttaacatgaagatctctaagtcccaccccagaacctgtaattcagtaagtctgagatggccttcgacacccctccctccaggtgattctaatgcaagtggtacaaggaccacactcaggtgcgtgttttgagtctatcatagtcatgaaattcaaattcaattggcaaaatgaaagccaaactcctttcatcctcagaattagtaatatggttgggagacttgctagtaagggaggaggtcacctactaagacactcataacagaataagtcatgccaagaactgagtgtagaagggcactggacccagatgaaacaacatctgaaagattgaaatcctcaagcaggaagaagatttgatgcctcaagcagagggaagccaggctagttctctgacccgtgagacagtgcataaatatcttaatggcagacacactccggctcaccaccaggcccagtcatgatcccagaagaatgccctgctactctggtgcctcattccaatgccagcaagccctgcctaccctcctggcaacattcctctccccttcctagtatcccagacacctgcctgacccagaagtcattgtcctcagacttggaggtcagccctcgcccactagatcttgcaggtcagctgcctcccacacagatctcaggctcttggaatggcctccacacaataaccctgtttgtgctgtgatttctgatggatgttgtgttgccagggacaactctgcacaaggattgatcagcctcatgagaatgcagtctctgggctgcaggcattactgcctgggatcaccacttgcttctgttgcccttcccaaaggaaaaagaattcatgtcccaacagaagaggtttccagttgtggttttctggaaatgtgcaacaaaggcagttaccaatggagacacagcctgaagctctccttggccacatcttcagccccctgcctcagggagagagagagagaaagggtaggggccctggagctgccccttgcaaaggtccttggaagctggcaatgtgcctctcagagtgcccaccaacctcctttccctaccaagctccacgtaagcattaaattaattaatacactaccaaccagatctcaaactagaagccagtaagatccagcatgaacacttagaaggatcccttctttttgaaatctgaggaatttggatgcattgaaaaataaatgaacatatcataacacaataatgtttcctacctttttttttttttttttttttgagatggagtcagcctctgtcatgttgcccaggcgggagtgcagtggcgtgaccttggctcactgcaacccccgctcaggaggagagcccaagagtttgagaccatgttgtccaggctggtctcaaactcctggtttcaagcaattctcctgcctcagcctccctgagtagctgggactacaggcacacgccaccacacctggctaattttttttatttttatttttagtagatacaaggtttcaccatgttggccaggctggtcttgaactcttgagctcaggtgatctgcccacctcagcctcggcctcccaaagtcctgggattacaggtgtgagccactgcgcctggcctgtttcctacctattaagaggttactatgtgccaggtactatgccaagtccctggaacatagcagttcactgaaaccttacagtaactctttagggtagatatgaccattattttctcctttttatggatgcagaaactgaagttcacagattagtgatgtgtccaggatagcagggctagttgaaggaagagccagcattcatgaccgtaaccaccaggcttttttgagatggggtcttgccatgttgccagggctggtctcaaactcctgggtgcaagcgatcctcttgcctcaacctctcccaaactgctgagattacaggcgtgagccactgtgcctggctcaaatcatgcttaaaagagtgattttagagcttggcatctgtgactcattgtagtacctctgaaaaaggttagggattgtgaggctaaattcagatatcaagcaagattccttactttgtcccccagatagctactctatatgtatagcatgtaccaagtgatctaaattttttcacctagagtaggatcttaagtcacagaaatgcaagcccaagctaatactctcccctctttctctacccccaacccctcaaccctcatgccaggctctcttgaaacccaggtttcaactatcaggttaagcccacataggttctgatatacttgaaagattcccaattattgcatttcaagataatccctattttctcaccaatttctaaacaaaccaaaaaatgctctaagattttattttttgttttgaaacagggtctttctccgtcacccaggctagagtgcactggcacactcatggctcactgcagccttgacctcctgggttccagtgatcctcccacctcagcctcctgagtagctgggactacaggcatgcgccaccatgcctggctaatttctttctactttttgtagagatgaggtcttgctgtgttgtcccaggctggtcatgaacccttgggctcaaatgatcctcctgcctcggtatcccaaagtgctgggattaggcatgagccagtatgcccagcctaagatttttaattctgtttttgacattgcattcttggagacagaaatggttaagaagtacagaaaaccaaaaagttgatccacttgtatatctaacaaagattagggatcatcatgccacaagccacaccattaatgagcaatcactgtgcactcagtaccaggtggcgggctgagtactggggatagagatgaaggcacttgtagatgctagatctagtagagaaactgacacgttgatagaccattataggcttccttagagggaagcccaggagccgtggggacacagaataggcacttagaacccttggggaacccaataatgtttttaggggtggccagatgaagttcattatgaagagaagccagaaagtttacaaaaacccaagtaagagtcaccaaacccaagggagaagagattgaaagagagagcagtcaacagcaacagatgccacagaatggtcaaattagaagaggcctgaaagtatgctctgggatttcgaaattagaagattagggtcattgacacatgcagcatagatgtggctggaaatgtagaggctccctagagctgggctgaggagaagagctaagaaaaaagaagaatcggccaggtgcagtggctcacgcctgtaaccccaacactttgggaggccgaggtgggtggatcacttgaggtcaggagttagagaccagcctggccgacatggtaaaaccctgtctctactaaaaatacaaaaattagccagacgtggtggtgcatgcctgtaatcccagctactcgggaggctgaagcaggagaatcgcttgaacccgggagatggagattgcagtgagctgagatcataccactgcactccagcctgggcaacagagtgagactccatctcaaaaaaaaaaagaagaagaagaagaagaagaatgaagagactgtgcagtggaggactgatgggatagggtccaaggagtcccaaggggacaagagagtagccctgggccagggtaggaagcaaagtcatctctcgagagtgggtggggaggggatgatgaagggctttgaggggaaccatgagggtttggaaagccaccaagaggaatgaaagtgggaactgcccgatggagagggaggattctgggagacccatgcgtttgtggtggcaccaggtctgtggagttggatggatggctctctggggcttggccacagaagccaggtatggagaatccagggttagggatggacagacaggagaaacactaaacagttggggacactgacaacagggtggttgaagtgataggtcatgggttccatgcgggataggaaatccaagggagaggggatagacgggaggaaatatgtggtggcaggaaaggtgagaggaagccgacttcgttcattggtgaaccattccgagtgatgacaaggtcaggtgcagccacagaactggagtttctaaagatgctcaactcctgggttttctcttcccctggatcctttatgggaaataatcagtctgaggactgggcaagcctccaacactttcttttcactctgcaccagcactgggacggctctccaagatggggggcagggggagagcctcattcgtgactggttttccttctaaaatgaaaacctgtttataatcaggactcccaccaccttcgagatacaagcatttgtgggaagggctccttgagggacatcatcaggggctttagagatgcctcaagtggtggatgcactcacgagaataattccctgccataatggggcagcagacagtggtgatgcccattatttactttgccaattagcatgtgaggcctgaggttattaaatataaatggctcaagctctgtcattccaaggcccgctggggaatggtggcttctaactgatgtggagcagcaccagggtggaatttctaaggagaaagactgacattctcctccctttctgccctgattctgcaccttgcctctcagggccttcccaacactctgcacagagaaggaatatgcctttcagcagatactgccttgctctcttgatgaccttgacattgcctgccatctttgttgccttccaaccacaaggtcccctgctcgtgactaccatcctcctgcctccactccagcacgggaaatccaatcttgagcttgcctggaatcacccccgaacacgattctaactccagggacagaaggtcaacagcacagccaatggatgacagccccagccctgcagctggggcacctctcagccccaccagaacacaccatcccttaaatagcagaagtggaagggctcaactggccatttaacgacatatacatccacccaaacacaggggaaggttgggtgtttcttggttcgtaaccttgaaaaggtcatttatacacccagatatagagtacctaggaataagcgggagatgctggctccctcccaggttgttcaacagaattgtgagtggaaatgttggaattgctagctttcatcatttccatatggttacttagcacccattttctgatttagaagcaaagatatttgggtgagagtttaggcaaggaaaatgtttggatctgtgagagttgcccagaaaacagagcttgagacaaaagcttgtgtgtgaatacactactggggggtgtgagcccagggagcataattgaggctccgggaactgacgcagggagggaggcagaagcacttgagtgcgtgtcactggggtggccacattcctggctgcttgatttggagggaactgtctgaggactgtaagaagtgtctcaggacccgcccctggggtaaaggggagggcacttacccactggccccttccccataggtaaaaggctctgcacacctgcctgagccgagcttccagaatgcactggcttggcactgaatgggttccagtgctttctaagctgcagtgtcagaagagatgccctgggctgggtttgagagatggcagctgcaggcctgaggcaagatactgtcagtttacacctgccagagctgctgggaacattcacagttctcactgccacagcagtggctggaaggatctcagagggtgtttaagaggtgtgtggtacagactattttcaaaaagagggataaatttggagccaaaaaagatatcttaagttaggatggagggatataagatatcaaatgtcttttaatgttacagtattcttttagggaggcagcattaggctagtggctttgaggtcttttcaacctgggctcagatttcgacctgggttcagggtccacttctattgtttctgagttgtgtgaccttggagaagctattgaactcccctgagcccctcatctagaaattgccgatgtccacatcctacagttttgtaaagattgtgtatgtaaattgcttagtatagcatctttacataatagttgcccaattaatggaagctgatgttttttactatagagaaaattactgatcatggaatgtaaggcatgcaggaagacaatggggtgatgtgctaaagcctcaaaaatcaaaaatagaagtgaaagaagatatcatatggttgcaggaaaccaaaaagatttctaaatgttccgaacaaccaagcagcttctgtctacaatgactacgtatcctggcatttccaagacagcatccatttgaaatattctctctggttgtcccagtacataaattcatatttgagaggcagtcacctcgatcttgaaccagaaaacagcatcataggtctaccccacccaggagggaaaacatcggctcctagtttcctttgctccacccactcctggagtgtcaaaaacataacccttcttttctgagattcttcctccaacacctcgcctgaaggggcagttttgttttcagaagtgagttaactaacagtcacaggcctttcagaagaaccggaaacttgcagtgcaatggataccccacagcagaggaggaaccaaaatccacaggtggagaaccccccacctttaacctctgccccatccccgcaccctctcctgctgagcctgtgggatccaccgcagcaagaaatggtttgggtttttctgttatgaacatgatagaagctcatttagaatatttttaaaacaaagaaacatagaaacatagaagaaggaagaaaagactcattttcttttattttttttgagacagagtctggttctgtcacccaggctggagtgcagtggcgcgatcttggctcactgcaacttctgcctcccaggctcaagcaactctcccgcctcagcctcccgagtagctgggatcacacagacacgcatcaccacgcaagattatagacacatcccttctctgctgctagttttctgtgtggtcctctagactgggagctctgtgaacagtgagccccttctgactggtcctctgttacatcctgacagttgagctctgataggttaaagatggccacttagtcgtgactgttccctcatccacagctatagcttatttctccatcccttggaatcttgggctggccttgtgaggtagccaacttccagaatgacccccatgattctcacttcctggtcattcatgctttttcataatctctccttccaccatgagtcaggggtcacaatagatacagtatggtggaaatggcaatgtatgacttctcaggctagcttatgaagggcatttgggttgctgccttggtctcctggattacttgcttggggaatagtacccatcaggttgtgaagatactcaggcagcctgtggagaggctgatgtgcagaaaaactgagactacccaccaacaacaagcaccaatttgtcaattatatgagtaagccaccttggaaatggatcctccagccccagtcaagccttcagatgagtgcaaccttggccaacattttcactgcaatctcacggacactcccaacctgaactgcccagaaaaactgctccataattcctcacccacagaaactgtgagagataaatgtttatcatcattttaaaccactacattttgggattattatgcaactatgaataaaacaccccatgactggctttgtccaatagaatgcagcagctgtgatattctggaacttctaaactcaggccttaggagaactgaagctttcacttcttgactttaggaatccaggcaccatgctgtaagaagcccaggccacatggagaaaccacagaagagaactgaggcactccaggtgaaagccccactgaacctcatagccaacagtcagcattgattgccatatctgtgcatggaccatcttggaggttccagccgtgtcatgtcctagacacctgcagccttagctatcaccacagagagcaaaacacacagttgagctcagtcaacccacagaaatgtgacataataaaatggcagttgttttcagccccagttttggggtgatgttttgtactgcaatatttaaccataagctggctcagcttctggcatctaattgactcttgaaaaatacctggtgggccaagcacagtggctcacacctgtaatcctagcactttgggaggccaaggtgggcagattgcctgagctcaggagttcgagaccagcctgggcagcatggtgaaaccccatctccactaaaatataaaaaattagccaggtgtggtggcatgtgcctgtaatcccagctacttggcaggctgaggcaggagaattgcttgaatccgggagggggagggtgcagtgagccgagattgtgccactgtacactccagcccgggcgacagtgagactccgtctccaaaaaaagaaaagaagagaaaaatatctggtgaacacatgggtgtcccttgttgagtctcagcttcctcttctgtaacatcgcagaggttaggctattccatgcctcacgttctactagtctccacctctctgtggtggtgtgtctcctagcccagctgcctgctgcagggtcacactttattcttgcaggaactccagcatctgtggcgtctctgtcctccaccgcatgctagttcctcctcccttctttctgaggcactcacacaccccaggtacccgcttcctcctgaagctctcctggcgttttgatcatggggctgtgaggtttggcaggaggagagcagtacaggccctctgccttttgggttacacctcctcagttcagccagaggatgctagaaatgttcccaaaagggccctgtgacacacaggtgacaagaggaacaaacgcagactgtctgccatctacccttcctcaaggccaagtcctggagttgtctttttgctagaacatgactggcctctttcacagtgtccagagcccaggctacatttcttagaacagagatgagaaccctgcttctgagaacaaatgctcagcctcgggcttattaggttcccttatttgccacagaaacaccaggatcggccgggcccggtggctcacacctgtaatcccagcattttgggaggccaaggtgggtggatcacctgaggtgaggagtttgagacaagcctgggcaacatggcaaaaccccgtctctactaaaaatacaaaaattagccgggcgtggtgccgggcacctgtaatcccagttacttgggaggctgaggcaggagaattacttgaacccaggaggtggaggttgcagtgagccaagatcgtgccactgcactccagcctaggtgaaagagtgagactctgtctcaaaaaaaaaaaaaaagaaacatcatgatcacttttactagtggtgcctacggccatctgggggcagggagtagatctctgtcattcccattaaaacaataaataagtaaaaaggaaactgagggtccaggagcggtggctcacgactgtaatcccagcactttgggaggccgaggcagacatatcacgaggtctggagttcaagaccagcctgaccaacatggtgaaacccatctctactaaaaatacaaaaattagccggctgtggtggtgcgtgcctccaatcccagctactccggagactgaaaaagaagaatcacttgaaactgggaagcagcggttgcagtgagttgagatcatgccactgtgtactccagcttgggcaacagaacgagactccatctcaaaaaaaaaaaaaaaagaaagaaagaaagggaaactgaggcctgaagaagccaagtctctggcctaaggtcacaaaacaaacccagcttactggcagaattggaattgccttctttctatatccaatcgcccactccaccctcctacacccacctggcctcccatgtcactcagccatcacggtgtgacccacttaaatcattattcagaagaccagttggcccttcctgactgtaagtcacccccaaagcatcactgtcaccattataattagtaaggcctcattaaactaagaaggtacctgtcccagactttaggaagccacctggtttccggaggctgggagggactatgacataattcatctatccagcagaaaatactgattgaatgcctgctgggttctggggtgccctaaaaggtgctagtgaacaaaacccaggccctgctcacgaggagcttgcagtctagtgggaaattcggaagccctgcctctgcctgtgtgcacattatgatggtgaatgtcacataccctggcccagcccaagggatgttttcatatattgcagagcagaggagaaaacagcaaccttccccttacactccagacttgcccaactgcctgctgggtctcgcctgttggatgctaataatcatctcaaatcatcccacatcaaaatacatcaaacagaactagctcttaggctctgcccaccctctcttcatcaatggcacccacctacccactcgttcaagtcaagaacaatgagttgtctcagttgcatccttgtcctcaatttcatcctctcctggtcacatccaatccatgagcaagtgctgggttgggcatgtccaaactctgccccaaatccaaccccacagccatcatcctttctcacctcatgcctctgctgttactcaacgattccacttcaaaacgatcatcacaaatctcaaatgggcactgggccctggctggcaagcctatattacctgggtgagttcactctcccactctcagacctctgtgaccactctttccacagaaggcctaacctctctagcttcctgagactttactattgcaaccatttccccctttctcctgcataatcaatttcttcttgtctaccagattattccaattaacgtacaaacatgttctcctatctcccttctgaaaaattcccttcctcttgcccatcacccctctcactgctactccattcccagctgtcctttacagcaaaatttttccaaagaattctcttcctctcctatcatcctctttcacctgctccaaagtggcttctgataagtggcttctgcctctactgctcctctaaaactgctcttgtcacaccactgatgatctccactctgccaaatccagaggtcacatgtgggtctctgtcttacttggcccttatacagttcttttcaaaacatccattaagaccgggcacagtggctcacctctataatcccagcactttgggaagcccaggcaggtggatcacctgaggtcaggagttcgagaccagcctggccaacatggtgaaaccttgtctctgctaaaaatacaaaaattagccgggcgtggtggcgcatacctgcaatcccagctaatggagatgctgaggcaggagaatcacttgaaccccagaggtggaggttgcagtgagccgagatcacgccactgcactccaacctgggcaagagtgaaactccatctaaacaaacaaaacaaaacaaaacaaaacaaaaatagagatcaaaacatccgttggccacctcttaatctatccaagcctgattcacttagaatgagctcttctgttctcgccaggccatggtaggatggagagatgtcaagtctcagcactcaagtcacacatttgtggtggtccagcagatcggacttaagaaaggacgtcaatccatccactggtgctggaaaatgcgagggtggaatgttggccagggcaggccgtgagatgtccactaggatcaccagacaatgtccctgtgaacttgttccctttatcttttacacagggctggaaatagaaaatgtaaaacattgatacagtccaggcacagtggctcatgcctgtaatcccagcactttgggaggccaaggcaagaggattacttgagcccaggagtttgagaccagcctgggcaacatagtaagacctcatttctacaaaataaaaaaataaaattagccaggcatggtggcatgtgcctgtaattctagctacttgggaggctaaagcagggggatcatttgaccctgaaagtcaaggttgcaatgtgccatgattgtgccactgcactccagcttgggtgacaaacagagtaagatcctgtcaatcaatcaatctaaataaaaataaataaataaataaaacgttgatacagggagtgacaggatcactggtgtttctttttcgcttctcaatttccatgattgctgttcaaatggtgtttaggggctgcgtgcggcggctcatgcctctaatcccagcactttgggaggctgagatgggcagatcacttgagctcaggagttcgagaccaacctgggcaacatggtgagacccccgtctctaccaaaaacacaaaaaaattagctggggatggtggcacatgcctgtagtcccagctacttgggaggctgaggtaggaggatcacctgagcccaggagaccgaggttgtagtgagtcaagatcgtgccactgcattccagcctgggtgaaagcgcgagattccggaaattccgtctcaaaacaaacaaacaaacaaacaaacaaaaaatggtgtttaggcaacagagaaaagttgagtgccaaaatttacaatgcctgataagaagatttggtcctcatctgcacggatcccgcctatgggcggtgagcaggaaagaatccccaccacaggcagcaattaatagagacctgctcacggcagctctgaaggatgtgacggctggagcctagctggcatcactcaggattcctgtgcagctgggattgtgtctcagtgaccttttcaagaacttggctatagaatccatttatctgctatatactctgtttaacctttatgctgacaaagaatgccccagggaacaacttgaaaccttgcctttcttttctctctttctggagattaatccatattcaatcccaatcttttttttttatcaataccaatctccttctcagacctcttcacctttactggactcagaagcttcagttctccttcctctaaagatgaaatcaagccttgtcgccctgacaacacatttcctttggcccagggttgtaaatcaagaatggcctaggtccctccggtcctctcctgaggtcccttgtgtatctcccttgtgacacatcaaaagagccatacacatacttattagcatctctgctcttgaattgtggactccaggaatgcagaaattggaccttgtcccctccctcctttcctaagaccagaccctttagagaccctccagaaacacttgttgaaagagtgaaatccactaggggcccgtgaagggccctctctgggcctgttgaactcaaggaaacctttctcagttcttctctgtccttctctcagcttttctagacacaacatactctatccagctagcgtttggaaaggtcctgtctgactccagcctcatctgccagaaagagagagagaaaaaagttactgcatgctgagttgagatatttttaggctaacagctgctgggatgaaccagagagtttctgttctttttttttttttttttttttttgagaacagaatctggctttgtctcccaggctggattgcagtggtgccatcccagctcactgcagcctccacctcctgggctcaagcgatcctcccaccttagcctcctgagttgctaggactacaggcccacaccaccacacccagttaatttttatattttttgtagagatagggtcttgctatgttgcccaggctggtctcaaacttctgggctcaagcgaccctcccacctcagcccccgaagtgctgggattacatgtgtgagccacctgcctggccctgagtttctgttcttgttccgcaaggtgtgacagacatcacttcgtcctaggctgcagaagcttcaaactgacaagtcccatctagggaacagagcagtaccatgaggaaattcctgtttctgtggctgagtctgcacaaaaaagagtgaatggggtatgctaaattttgctttctcttaaggacttctgaagactgaaaaaccaagatctattaagaggggtgtggttttgagtctagcccactgggaaccagcatgagtcctgtgtgacaggcccaagcctggctgctgattctggcagagttggccaggtaaggcatgagagtcctgggaaaataatgtgggagggtggacaggaagtgcctgcccagacagagtagggagaaggatgtgagtaaaaccaaggatgtgtaagcacgtgcgtgtgtgtgtgtgtgtgtgtgtgtctgtgtgtttacaaactgacaagaggtgtaactctctttccttttgatgctgtgacctctcccaagggactttctccaataacggttggtgagtttccttactataaaggggaacactagacatttccagaaatttaacaaagcctgcatcaaactacagttgggaagtgtgtatgtaaaattgtcacaagattattgactatggctgggtgtggtggctcatgcttgtaatcccagcactttgggaggccaagataggtggactgctttgagctcaggagttcaagaccagcctgggcaacatggtgaaacccgtctctgcaaaaaaaagtaaaaaaaaaaaaaaaaaaaaaaaaaaaaaaaaagctgggcttggtagcgcacctatagtcccagctacttgggagactaaggtgagaagatcatttgaacccagggaggtggaggctgcagtgagccaagattgtgtcactgtactctagcctgggtgacagagcaagactccattaaaaaaaaaatcagaagtttaaaagaataaggaccagacctttaaaattctgtccaactttataatcttatttaaaaataaatacaagtttttggccgggtgcagtggctctcgcctgtaaggcatgactttgggaggccgaggtgggtggatcacatgaggtcaggagttcgaggccagcctggccaacatggtgaaaccccatctctactgaaaatacaaaaattagccgggcgtggtggcacatgcctgtaatcccagcttcttgggaggctgaggtaggagaatcacttgaacctgggaggcaaaggtttcagtgacccgagattgtaccattgcactccagcctgggcaacaagaatgaaacactgtctcaaaataattaattaattaattaattaaaataaaataaataaacacaagtttttgaaaaacaaaatagattgatgtgttttggttttagggagaccttaacttttgtttgatgggagaggaggttgaacaaaactgttctagaaagctactcctttattctgcgtgtctcactaattaggcagaagaggaatcacggggctagcttgtcctgtagactatcagatcttttgtttcatagctatattttaagctttttttttttctttcggtagtttcctcatctggatatttgaagctttttaatcatagaaaatttcaaacacgggaagttgagacaggagaatcgcttgaacccgggaggtggaggttgaagtaacctgagatcacttcactgcactctagcttgggcgacagagcaagactctgtctcaaacaaaaaaaaaaagactgggtgctcatgcctgtaattccagcactttgggaggccgaggcgggcggatcacctgaggtcaggagttcgagaccagcctggctaacatggtgaaaccccgtctctactaaaaatacaaaaattagctgggcatggtggtatacatctgtaatcccagctactcaggaggctgacgcacgagaattgcttgaacccgggaagtggaagttgcagtgagcaaagatcctgtcactgcattccagcctgggagacagaacgagactccatctcaaaaaaaaaaaagaaaaaagaaaaaagaaaatctcagatagacacaaaagcagagatgatagcggcggaatcaatgcctgtgattcccgtaacccaatgagcaacacatgcctaatcttttttcatcagctccctagtcctgtctcaattgcattttcaaacaaattccaaatatattatttcatttgtaagtacttcattgtgtatctttaaaaatatacgaccgcaacagcattagcatgcctagaaaaagtaacaataattcttaatatcataaaatagccagccagagttaagttttcctgattttttttcttcatatttggcactgaatatttatcaagagtcttcaaaatgtttaggctatcaagtccacttctataaatatttcctgaatgcagaataaactttctacatagagatattttctgcagtgctattgataatgaaatgtggccaaattaaatgggcacactaggtaaattaagtcgtggtcatactcaatgaaatagcattgtggttagagaaaggcaggatgttagacagactcactcctccatttatttactattaagtgacctgccttcttgaagcatcattttactcacagataaaatatgggtgataataatacccacctcatgggttaggccctcccattgtgagggctacacaaaaatgcacctaacacagcaaagtgtttgcatggttccaagtgaaccctcaatatatggtcactgtaaaatgtgcagtaataaatgttcatgaagaacttgtagtaacataaaaaattataaagtcaagtttaaaaatgataaaacaggccaggcctgatggctcacacctataatcctagcactttgggaggctgaggctggaggatcgcttgagcccaagagttggagaccagcctgggcaacatagagagacccctacaaaaaaataaaaacaggctgcgtggggtggctcacacctgtaatcccagcactttgggaggccgagataggtggatcacttgaggtcaggagttcgagaccagcttggccaacatggcgaaaccctgtctatactaaaaatgcaaaaattaactgggcatggtggcatgcagctgtagtcccagctacttgggaggctgaggtatgagaatcccttgaacctgagaggcagaggttgcagtgagccaagatcgcatcactgcattccagcttgggtgacagagcgagaccatctcaaaacaaacaaacaaaaaattaaaaacaaaaaaattacctgggcatggtggcacacaccggtagtcccagctgcttgggaagctgagatgggaggatcacttgagcacaggaggtcgaggctgcagtgagctgtgatcatgccactgcactccaataaaacaaatacacatatcctataactacagccacataaagacagtgtctaaagttaatatgtcaaaataacagattatcattgcgtagtgattctctatcgtcccccacccctgcccttattctgcttctgtaaaaacaatgcaaactcaatacagaaaatttggaaagtgcagaatggggggaaaaaatccaaggtttgattaattaataaaggggcaatgttgagattttcctcttaagtccacaaggcttaccacgcccccgtccattggctaccaagcccgttagcgctacctcgtggtcaaactaagcaactactcttagacaaaaaaaaaaaaatttcaaggaagaattaaacaagcaatggtatagctccataagtagcaaaaatgttacgctgggacttttatcttggggcttctatgggcccagtgggtatcccaggggcctcatggaattgacctcaggtgaacaaaaatatggctcaagtattttatatgactgactagtccgcgatacattctccatgaatctagcccacccttagggctatcctgtgttcagcctgagcctttccggaaatttgtctccactgtgtccaatgtacagagaggagcaagcccacccactagtgcagagaaaagctggcccctgcccgctggaagcccacctgagagagggtggtccgagaggaacccatacctgcgtcctccacccacatcgaatccccccggggccaactgttctggaaggcccctaaaccagctgcggggccacttggctctgaagtgtttggggcgctttgacataattttgttgtgtctgcccagaaatcctgacgcaggcggtcgggggtggggggccctggggatctgtaattgacaaaggctcagtgggtttggggacctggcactccctagatgacctttccggaattgccagtctctgtcctcttccggaggaatctggaaaacttcctccagagtgtggcattgtttcaagagtgacacatgtcatcgaagcagggctctggaggcagatggcggatttcctcctggctctgcccccaaacctgctgagccacagcttcttcatctgtgaaaagaacatgataatcttcatacccagctctcaagcttgttgtgaagactatttagtgtaataatttaattacacttatatttacatttaatcataattatttaatataggtaaagccccaagcccttattattatttttgagacagagtctcactctgttgcccaggctggagtgcagtggtgtgatctctgctcacagcaacctctgcctcctggtttcaagcgattctcctgcctcagcctcccaggtagctgggactacaggcacacgtgccaccacacccagctggtttttgtatttttagtagagatggggtttcaccatgttagccaggctggtctcgaactcctgacctcaagtgatctgttcgcctcggcatcccaaagtgccgggattacaggcgtgagccaccgtgcccagccccccttattattattacatacatatgggtgcctttaaataatgtttaaaaggaacaaccctactgtggtttgaatgtgtgtgtctcttcgaaatgtgtgttgaaatttcgttcccaatgcatgaggtggggcttttaggagatgactaggtcagagggccttgccctcatgaatgggattagggttcttataaaagggctgaagggagcctatttgtccttttcatccctttctccctttccaccatgtgaggagacagcatttgtctcttctggaggacgcagcaacaaggcaccatcttgaaagcagagatggagccctcaccagatactggatctgccaatcccttgatcttggactttccagcctccagaactgtgagaaataaatttctactatttataaatcacccagactaaggtattttgttatagcagcaggaacagactaagacaaacgcttaaaggaatcttgaagaagaatctccgggtgtagttaaaatatacggtttgaaccattcccctaagtaaattcaggtggaatccccatgtcatggatgatgtgtgtcatttatagaagtgatctctctagggaaggatgagtagtgggtgcctgagggggatttagggacagccaaggctggttgtaatgactagggcagtgtctcaatttgtatgaccagtacgtgatgacatagaatagggttttccaaagtgggcaccgctgtggtactcagatgcttctagtagtccagagaccaaagctggtgtattaggccattcttgcattgctataaagaaatacctgagactgagtaatttacaaaagaggtttaattgggtcatggttttgcaggctgtgcaaccatggtgccagcacctgcttggcttctggggaggcctcagggtgcttttattcctggctgaagatgaagcgggagcagacatgtcacgtggccagagcaggagcaagagagagagtggtggttgtgaggggtgccacatacttaaacaaccagatctcctgagaactcatttactatcacgaggacagcaccaagccatgagggatccgctcccatgacccagacatctcccaccaggcctcgcctccaacaccagggtttacagttcaacatgagatttggccaggatatatattaaaattatatccgttggtcattaggtctactggccacaccattcctgctgatcctgtctgtggtgggtcagctgacttgagccttcagtggtctggccattctgtttcttgctgaaaccaattaaatgcaggcgaatttgccagactacagccctgtgagggtgggaactttgtctttttcaccactatatgcccagcccctagaattgtgcctggaaaacagcgtgtgctcaaaaatgtatgttgaatgagtgaataaatgaatgactgaatgaaattggcctcctgaattattcacccaactcccgacagcttgattaatgaagtaagctgataaagaagtttccagaggctgagggcagtggctcatgccagtaatcccagcactttgggaggccgaggcgggagaatcacctgcgatcaggagttcaaccaccctggccaacatcgtgaaaccccgtctctactaaaaatacaaaaagttagccaggcgtggtggtgcgtgtttatagttccagctacttgggaggctgaagcaggagaatcgcttggactcgtgaggcggaggttgcagtgagccgagattgtgccattgcactcaagcctgggcaacaagagcgaaactccatctcaaaacaaacaaacagaagttcctggaaaggtaaggcctgaactaaagccccacctggaaagatgctttattgactggctgatgaataagaaagacccctcccaaccctgccccttgctgcatggagcaaattgtcaggggccagacacctaggcttcatggtgctgtgccaggaggtcgtagagggccaagctgcccctgcctaactcctctatctctgctccctgattatcaatactcctctggcacatccaacagggctcctaggttgttaagtggactcaaggcccgggcaggcttaggctgcagattggcttctgtctgaagttccatcaaagagagaagagcaacatctcagaaacatgatgaaaggctcctgggaagcagggtctgattttcaaaaggtcatctacagcccacatcaagagtacctgctgttctcaaaggacagggctctaaacagagactgcagctatttccttctctgacattcaacacagtgactagaaccaggcaaaggcacccagaggaccatggcagcccatcctggagttgagagggctggatgatggggccctgagggagagacagcactgtcttgggctgttatagtcaggatctgccacatgtcctaacagggctggaggaagggtcctgatatggtttggctgtgtccccactcaaatctcatcttgaattgtagctcccacaattcccatgtgttgggagtgacccagtgggaggtaattgaatcatgggggcaggtctttcccatgctattcatgtgatagtgaataagtctcatgagatctgatggttttataaagggcagtctccctgcacaaactctcttcccttgtctgctgccacgtgagacgtgcctttcactttctgccatgattgtgaggcctccccagccacgtggaactgtgagtccattaaatctctttcttttgtaaatcgcctagtcttgggtgtgtcaggtatgtcttttatttttatttatttattttgagacagagtctcactctgttgcccgggctggagtgcagtggtgctattttgcctcactgccgcccctgcctccctggttcaagcgattctcctgccttggcgtcccaagtagctgggattacaggcgcttgccaccacgcctggctaatttttgcatttttagtagagacagggtttcgccatgttggccaggctggtctcaaactcctgacctcaggtgatctgcctgcctcaacctcccaagatgctggcataacaggcgtgagccactgtgaccggcctggggtatgtgtttctcagcagtgtgaaagtggattaatacaagtgccctgcctgtcttgagagacagtagaaagacactgtcctgggagtccaaggcagggcctgtccccatagggagcacagggtgagcaggacagaaccaatcttcagggggaactttccagagccgtggattgttggactgaccgctcccttgactgaaggaaggttcgaagaaggccctccagcccgaggtgtgtcctgaatcaggccctggggatcatagcaagaaccagcaggccctttcatcagagccccactctctgggcatgtcacagctgtgcctaggagggctcgctctctctcctccagtgggaacacagcagggccagtagggcctccgaactgggcccatcttcctcaagctgagttcgtcaatttccccaggcccagactgtccccctgagcctttgcccaggagctgctttgcccacaaagccttctcaccctgccttcttgttgcagattaaagggcacctccactgtaattagatcctttttcaaacaaaagaactatacgtaatgtccttgaaataactggggaaatttgaatatgaactgggcattggattatcaaagaaatatgatgacctacgtttggtgtgataaaggtatccctatgtaggaaattatctttgtgtgttctttttttttgagacgaagtctcgctcttatcccccaggctggagtgcaatggcatgatcttggctcactgcaacctccgcctcctgggttcaagcgattctcctgcctcagcctcccaagtagctgggattataggcatgtgccaccacgtctggctaatttttgtatttttagtggagacggggtttcaccatgttggccaggcttgcctcaaactcctgacctcaggcgatccacccgcctcggcctcccaaagcgctgggattacaggcgtgagccaccgtgcccagctatctttgtttttaaaaggaggccgggcgtggtggctcatgcctataatcccagcactttgggaggccaaggcgggcggatcaaaaaatcaggggattgagaccatcctggccaacatggtgaaaccctgtctctactaaaaatgtaaaaattaatcgggcgtggtggtgcactcctgtaatcctagcttcttgggaggctgaggccagagaatcccttgaactcgggaggcggaggttgcagtgagccaagattgcgccactgcattccagcgagccaagattgcgccactgcactccagcctggtgacagagtgagactctgtctcaaaaaaaaaaaaaaaaaaaggaacactgaggtatttgggggtgaacctctgcaatgtctgaagtttaccttaaaatccttcagaaggaagttagaaataaatctagcaagatgctaataactgttaagcctgggtggtgagcatgtaaggctttctgtatgtttggaaatttatataatataatgtaggaagaacctccgagaggccttccctgattccctagaactgggttgggtgtccctctcatgggtgaccgtagttcctgtcctggcccgacatcagtcaccgggacacttagaattctgaattcaactgcctgccttttaaaattaggttaagacccttgggggtacccccagagagtctgacagagagtagatgctaatacaggaatgctggaaagaaggaaggaggaagagggaggagggagggaggctgcagcccccagctcccgtctcagaaccaggcacacagcaagtcctcaactcttgtttattaggctgaattttcttttctattttttttgaaacggagtcttgctctgtcacccaggctggagtgcagtggtgcaatcttggctccctgcaacttccacctccagggttcaagtaattcttgtgcctcagcctcctgtgtagctgggaatacaggcatccaccaccacgcctggctaatttttatatgttctttttttagtagagacaaggttttgccatgttggccaggctggtcttgaactcctgacctcaagtgatctgcccgcctcagcctcccaaagtgttgggattacaggcatgagccagcgtgcctggtctaggctgaattttctaggaggaagccggctctcctgtcttccttttccttgagggttctatcagtgtcatagtcagaagacaggctgggttttgtggccgccttccttttctgtgtcccaagcccaccctcagccaaagtgctgttggaaattgaggctgaatatttatgcccaccacacagaaatgtgtacatgaatttttttgtttgtttgtttgtttgttttgagatggagtcttgctctattgcccaggctggagtgcagtggcgcgatcttggctcgctgcaacctctgcctcccgggttcaagtgattcttctgcctcagcctcccgaatagctgggactacaggcgtgcgccaccacgactggctaattcatgaatgtttttagcagcagtattcatgatagcaaaaaaggtcaaacaacccaaatgtccaccaactgatgaatggataaaatgtggtgtatccatacaacgaaatattatctggcaataaaagggaacaaagttctgatggatgccacaacagggatgaacctcaaaaacattacgctaagtggaagaagccagtcacgaagggtcacatattatgatcacatttatatggaaggtccagtgtaggcaaatccacagaggcagaagactgatatgtagtttcctaggactatgagagttagaggaagacagagtctcgctctgtcacccaggctggagtgcagtggcgtgatcatggctcgctgtagccttgacctcctgggctcaagcaatcctcacacattagcctctcgaatagctgggactgcaggtgcaagctgctacgcctggctaatttttgtattttttattttagtagagatgggttcttgccatgttgccccggctggtcttgaactcctgggctcaagtgatcctcccacctctgcccccaaagtgctaggattataggtgtgagctactgcacccagccagtaggagttttttgggggggatgacaaaaatgttctaaaattgattgtagtgttggttgcaggactctgaatataccaaaaacctctgaatcgtcactttaaaagcatgaattttatggtatgtgaattatatctcaatcaagctgttattaaaatatatatatatatatggccattatccagcctgtgctgcagggtgataaggcagaacgagatggacgtggggttggctgtcttcccaatttaaaatagaacaataaaagatgagctggggatgtggggcgagtatgtaacagggcctataaataagaccttggcttgtagctgtcagatgcaaggtgctgatgagggctgcttatctgtgaccttgcaaggagcaaagtttgatctcaatctattcactaaacagccaagtgtgatgctgtggagatggggaagacgaaaactcctcctgtggtgccagaaagatataattaaaaatataaatcacactttccaggcttggaagacatttatcatgtagctttccagaggcattgcacagacaaggcagtttgaataattccatgaattaccttggaaaagagaaggagggggcacctccagagtggtgggcatggtggagagggggaaggaaggaaggaaagaggacagatcagtagcaacgagggggaagtgggtattgttgtggattcccagcctggtggtccaggccaggacatgtgtggtgagcacacacagcattagacattttcttaatcagttgtcataagaatacgagctccaggagggcagagatttttgtttgttttgttcattgctgcatccccatggctggtgtgccacaattttttgtgtgtacatgttgagtaaatgaatattttaaaattagagttgacttccacctctggtgaagatggaataacagggaccagtctgaaacaagtaaaaaactggacaaaagatttcagtgaaccaaaaaaggaaaaacaaaaaaaaaagctggacaaaatataaaacaatggttttcaagacattggatgtcacgcaatggatctcaaggacaacaatccttgagagaagagaaatagactgggtgtggtggctcacgcctataatcccagcactttgggaggtctaggtgggaggatcacttgaggccaagtgttcaatatcagcttggccaacatggggaaaccccgtctctactaaaaatacaaaaattagccaagcgtggtggtgcatgcctataatcctagctacttgggaggctgaggcaggagaatcacttgaactcgggaggcggaggttgcagtgagccaagactgcgccactgcactccaagctgggcaacagagcaagactccatctcaaaaacaaacaaacaaacaaacaaacaaacaaagaatatcctatggctaagggagaagacccacagctggaattcagactttgtggggcaaagtgaaattacggcccactggataatgaagttcactgggttgtcccaggccacagctggtccacagttgctggacaaacagaaactcccgtctggggtgcaagcaggtagaggttggtgggcacagaactatggctaagattggcaagcaagaaatctccccatcagggtacagatggactaaagctggaaagtgaaccaccatggggcctgtgggactcactgagaatctgcccacggggactgctgaaacttgatgggaagctgtcagtgaggataattctaaaatttggtgagggtgagtaccactggatgtccctcatgctcccctggcaaccatgaaataagagcaagaaatccgtagaagtgcacgaaaacaagaaaagagaagcaagcacctttttacctacagtgcatctccagcgccctctactgacaaagtttagtattgtgctcatagcaaaggagaaattcttacagggtccagctcagttatcaccggcaggcaaggaagggtagatttgaagctgagagagaatagattgatagctggtacagacacagtctgacattcaataaaaaatgatcaggcatgcaaagaagacaaaatatgactcataatggggagaaaaatcaatcgatagaaataacctttaaaagtacacagatgaggctgtgtacagtggtccatgcctgtaatcccgacactttgggaggctgagatgggaggatggcttgaggccaggagtttgagaccagcctgggcaacgacgagacatcgtctctactaaaaatttaaaaattagctgggcattgtggtatgcacctgtagttccagctacttgggaagctgaggtgagaggatcgcttcagctaaggagttcgaggttgcagggagctatgctggtgccactgtactccagcctgggtgatggagtgagaccctgtctcttacaaaaacaaaacacagatgatagaattagtagacaaaaacaaaacagttatcatagcagctattacatatcctatattcaagaaggtagaggaaggattgagcatgtttcatctagatatggaaaatattttttaaaagatccaaactgaacttctaaaaatgaaaaatataatgcctgtggagggaaaatacactggatgggctaattccagattagatatcacagaagaaaatgccagtaaacttgaagacataacctttaaaatattcaaaatgaaacaagaagggaaaaagacggaaaaaaatgaacttggaaatagtccctggtgggagaggggggggaataagccaagcattctctttctgttcccatatttctgtagtgtagagataggcaaacttttacttaaaggaagagatagtgggtattttaggcttgtgggccatatggtttctttctttttttttgagatggagtctcactcttttccccgggctggagcgcagtggcacaatcttggctcactgcaacctccgcttcccaggtacaagcaattctcctgcctcagcctctcaagtagctgagactacaggtgctcaccaccacagggtttcaccatgttttccagggtggtctcgaactcccagcctcaagtgatctgcctgctttggcctcccaaagtgctgggattacaggcgtgagccaccgcgcccggccagggccatatggtttatattgcaacttctcaacccagcctatttaactctgctcaaaagcaatcatagacaatatataagcaaatgggcatgactgtcttccagtaaaactttatttataaaaacaggcagccaacccatggtctatagtttgccagtttctccccgagagcatccagtgggtaccctaagtgctcattcagcacccccaaaacccagaggggctacctaagcctggtagatgagagctcaccccaggccccagatctgtcttcctcttcttctctccatttaactggcattctccatccagatttcattcccccagggccttgaaggttagttagtaataagtgaatctatttagcacttgcagtatgctaaaatatggttcccccgaaagatattcacattctaatccctggaaactggaatggcttttgttttttttgagacagggtttcactctgtcattcaggttggagtgcagtggtacgatttcagctcacttcagcctccacttcccaggcccatgtggtcctctcacctcagtctcccaagtagctgggactacaggtatgcaccatcacccctggctaacttttcgtatttttgtagaggcgggggtttgccatgttgcctaggctggtctcgaacttctgcgctcaagtgatctacctgctttggcctcccaaagtgctgggattacaggcatgagctaccgtactcgctgactgttactttatatggaaaaaggagctgggtgcagtggctcacatctgcaatcccagtactttgggaggctgaggcaggtggattgcttaaggccaggagtttgataccagcctgggcaacatagtgagaccctgtttccacagaaataaaagattagccaggccaacatggcaagtccctgtcaagaaagaaaagaaagaataaagaaaaagagaatgtgagagaaagagagaagagaaagaggaagaagaagaacgaggaggaggaaaggaaggaaggaaggaggaagggagggagggagggaggaaggaaggaaggaaggaaggaaggaaggaggaaggaaggaaggaaggaaggaatctttgcagatgtgattaagaatcttgcattgggcactttgggaggccgaggcgggtggatcacctgaggtcaggagtttgagaccagcctgaccaatatgaaaccccatctctactaaaaatacaaaaaattagctgagtgtggtggcacgtgcctgtaatcccagctactcaggaggctgagacaggagaatcgcttgaacctgggaggtggaggttccagtgagctgagatcgtgtcattgcactccagcctgggcaacaagagcgaaactccgtctcaaaaaaaaaaagaatcttgcattggggagattatgctagattatccaggtaggcttgcaatgcaatcacaggtgttcttataagagagaagcagagagaggtttgacacacagaaggggctatctgaagacagaacagagaatggtttgaagatgctgaccttgatgcttggagtgaaggtgccagcagccaccagaagttggaagaggtaaggaatccactctccactagagcctctggaggggcacgtccctgactacaccttgacttcagcgcattgatgctgattttggactgctggtctctagaactgagagaaaaaaatgtgtatttctttaagccatgtattctgtgctaatttgttgcagtagcgctaggaagctaatacagtcgttgagtaattatctgcaatcatcaataaagtcaaattaccttcccccatcctgctttcagagctagtttttttttttttttttttttttttttttttttttttagacagggtctcactctgtccccaggctggtgtacagtggcgcaatcttggctcactgcaacctccaattcccaggttcaagcgattcttgtgcctcagcctcccaagtagttgggactatgggtgcatgccaccatgcctggctaatttttttgtattttttggtagagatgaggtttcaccatgtttgccaggctgatcttgaactcctgacctcaagtgatccacccacctcagcctcccaaagtatagagattacagacgtgagccactgcacctggtcagagctgggttaaagaggctttctgtacctctgccttaacacaaagcaggcttcacgggaatgggcgggcagcccagccaaggaatcaatgtgttgatgtgggaatcaggagatgtgggttcaagtcccgttctgccttcctcactgggtgatcctaggcctttggtttccccagctgtgaaactcccacatggggtagaagagaaggcttccctcctgctgcaaatgctgttaagcttaaagggaatgctgcgcaaacatggtctatcattacctttggggatgtggggcccttagattctacctgctgacagcctcccggctctgagtttttggagtaacaataatgataacaggagcggctaacctttactgcgtgccaggtgctgtgttaagcagttgacttgtgtccttctccagagaaagcatggaaataggctagtggagttggcacttagaatcagcaagacctgagctggagtctcagatctgccacaattagctgtatgaccttggacaagtgagtcaacctctcagagcatcataagcctcacttacaaaatggtgctgcctttgcctatcttccagggatgttgtgaggatcaggtttaccttgagcaaaatgcctggcacagttctcttgctaccatttgttatttgtgaccatttgttctttgtgactaggattcctgaacacacgtgttcacaaagtgggtgtgctgttgtctctcagtagaaaaccatctaagtgctaccacatccattcaaaaggtaacagtatgggcccggtgtggtggctcacgcctgtaatcccagcaccatgagaggctgagatgggtggatcacttgaggttaggagttcaagaccagcctggccaacatggtgaaaccttgtctctactaaaaatacaaaaattaggccaggtgcggaagctcacgcctgtaatcccagcagtttgggaggctgaggcgggagaatcacttgaggtcaggagtttgagaccagcctggccaacatgctgaaaccccgtctctactaaaaatataaagattagccaggcacgatggcgggtgcctgtaatcccagctactcgggagactgaggcacgagaatcacttgaacccaggaggtggagtttgcagtgagccgagattgcaccactgcattccagcctgggcaacagagtgagactctgtctcaaaaaaaaaaaaaaaaaaaaaaaaaaaaaagggcaccgctactatcccaacccctgccccactgctgaggaactatagaatatttcttctaagacagcacctagactcctgcatccatggtaattttcatgctgagtgctgagcgactaattttcccacctaaaattgattcttccttcttttgttattatagtctggagaaaggacataataaaaactctttgagtctgacaaagaaaacaacacgaaatgcgatttaacattggaagtaatcgttgtgtcgacaattctaaagaaaataaacagatcaaggagtagcttttagagctagtcttaagtcatgccagaaatatctgagttagagagagaaggttacatgcaacaatttgtttctgtccctgaaatgctgctcagcctggactttctgtgctggttaaaagcccttccaactccctgacccactggccctagccccacaggtgtcctcaatattgatctcactcttgactccatccagccacccagacctgtggatttcatgcctctcacagctgtgggatattcccctcggcctccctcctggggtggtttcatagccggttctctagtctcgctgtgtccaggcccgactgggcagagcaaccccccaagacagctcccatgagctctttctgatcacgatgatgaaaagattgtaatggtgactgccagttatgtacccagaacctactgagtgtctaccatattgcttaggttctttcatttaatttccaaaagcctacagggtagcttctgtgggtcccactttaatgatgaggcaacttgcccaaggttggtcaaggtgactgagctggtaaacagtgaaatgcatttgaactcaggaccatgggactccgaagtttgtgttcttttcactttactggtttccttcactggcttcccattgcccaacagctgagtttctgaaactgtgccctggggacatcaccgtataagatgttaacaatacattttcttttgcttttttttggagacagggtctctgtcacccaggctggagtccagtgtcatgtcacgatcacagctcactgcagcctcaacctcctggactcaaacaatcctcccacctcagcctcccgagtcactgtgactacaggagtgcaccaccacacccgactaatttatttttattttttgtagagatggaattttgcttgttgcccaggctggtctcaaactctcgggctaaagtgatcctcctgcctgagtctctcaaagtgctgggattacaggcattagccactgtacctggccataaattttccttaaacaacaaagtgtgtggtggtgggcatgggaggcctgtggttaaatccatttgggactagctccctgtgttgccccctcttggagaattcctggcatattagtatagtaaaggctttgatgcgtctgcaattaaagaacaaaaccctttaacccagagttttccaagggcactttgccatggaagccttttgcacagagcatctgtcagtctgaaggactggtgttcctcggcacacagtctaggaaccgctgggcttctggctcaagttgcaggcccttggcccagttggttcacaggcccctgtgcagcttctctggtttcacctcctcttgtgccctgggtcaaacttctgttctggccatagctcactgctcacaattcctccagccagagagggtgttcatgcctccatgagggtcttcctctgcctggcattctgtttccgccctccctcctctatgtgctttcaggaatgtactagctggaatgtcccctgctcagaagcattttcccaagcctttttttttgagatggaatctcgctctgtcacccaggcttgagtgcagtggcgtaatctcggcttactgcaacctccgcctcccagattgaagtgattctcattcttcagcctcccaagtagctgggactacaggctcactccaccacacctggctaattttgttttttttgtaattatagtagtgatggggtttcaccatgttggccaggctggtcttgaactcctggcctcaagtgatcctcctgccttggcctcccaaagtgctggtattacagatgtgagccaccgtgcccggcctgcattttcccaagccttctaaccagagctaatcacctaccccatgattgcaccatccatgtacctagcacttacttttagtacagcttgtctctctgtgtatattgaataatatttatttatttatttatttgttttttttgtttttttttttttgtttttgagatagagtcttgctctgtcgcccaggctggagtgcagtggcaccatctcggctcactgcaagctccgcctcccaggttcacgccattctcctgcctcagcctcctgagtagctgggactacaggcgcccgccaccacgcccagctaattttttctatttttagtagagacagggtttcaccgtgttagctaggatggtctcaatctcctgacctcgtgatccacctgccttggcctcccaaagtgttgggattacaggcgtgagccaccgcacccggcttgaataatatttatttttatgtggccgtcttctattgcagaccacgaacttcttttttttttttttttttttttttttttttttgagacagagtctctgttgcccagggtggagtgcaatggcacgatgtcagctctcagctcactgcaacctccaacaccggggttcaagcaattctccctgcctcagcctcccaagtagctgggattacaggcgcacgccaccatgcccagctaatttcttgtatttttaatagagatggggtttcgccatgttggccaggctggtctcgaactcctcacctcaggtgatctgcccacctcggcctcccaaagtactgggattacaggcatgagccaccacgcccggctgaccgtgaacttcttaaagggtagactgtcttctttatttcagaatcttcaacaccaagcacaggggcctgatatgcaacagatatttgccagctcaacttcctattgtattttagagtattttcttaatatatatatgtatatatttgtctataattcatgacaggtgcattggcttgtgcctataatcccagcacttcgggagtctgaggccagaccatcgcttgaggccaggaatttgagattagcctgggtaacatagtgagacctcgtctctacattaaaaaaaaattaaattagccaggtgtggtggtgcatgtctatagtcccagctactcaggaggctgagacaggaggatcacttgagcccaagagtttgaggctgcagtgagctatgagctcccaggctggagtgctatgccattgcactccagcctgggtgacagagggagaccctgtctctaaaaaagaaaaaatagaagtaattcatgcccattgtgggatgttaaaaaaataagaagaaaaatccataattctggagggatcaggcaaatgattttccacctggtgttaacataagaactggccaggcgccatgttacatgcctgtaatcacagcactttgggaggccgagccaggaggatcacttgaagccaggagttcaagaccagcctgggcaacatggcaaaacccagtctgtactaaaaaatacaaaaagtagctgggtgtggtggtgcatgcctgtaatcccagctactcaggaggctgaggcatgagaatcgcttgaacccaggaggcagaggttgcagtcagctaagatcatgcccctgcactccagcctgggtgacagaatgagaccttgtctcaaaaaaaaaaaaaaaaagaaaaagaaaaaaagaattacctgggtgagcttgttaaaaatagaaatgctcacactgtgcctgggccacccagctgctgtctcagtgtgtgtgtgtgtgtgtgtgtgtgtgtgtgtgtgtgtgtgtgtgtatacatgtgtgcatacgtgtgtctaatgaaattccagctgattctaaaactcatccatccctgtacctagcacttacttttagtacaacatcatccatcattaagcgtctggtgattcaaatatttttgtactacaaacaaagttgtgataaatatctttgtacgtaactgtttgtctctgggtctatttattgccttagaatagattcctagaagtggagttactgagccaaagggcaggcaggttttcaaggctcccgggacaaatcatcaattactctgcagaaagactgcgccacttccctctcccaccggagcctccgagggtgcttgtctcatcaaacccccacaattatggccacttttgacaagaaagaatacgggaatagttgctattaaatgtgaaagaaaaattgcctagctgggtggtttttaaagagaggcatttagcaagcttttgaagactaattactgtttaatcatcctaggaacacacaggctcattattttctttttgcagagactgagaattgcaatgcatggttggtaattttgccaatgctgtaaacacccatcacttcattttcctagaaaagctttgctctctctatgtgtgaaggatgaagcctgtgtgtttcgttctccccagacactcagctaacgggcaggtcctctcagctgacagcatctcacccgagatactaacacctacagtgtgggcaggggactggccgcccaccgcacagaatgttgcccgaagctcaatgttcttagctgtcatatttcatgttttcaccctttcctcctccatccatctctggcaagcaagggcaccctggcagagtttcttgaagtttgcctggacagttcattcctgccttagaatggaaaaggccgccgggcgcagtggctcacgcctgtaatcccagcactttgggaggctgaagcgggcggatcacgaggtcaggagatcgagaccatcctggctaacatggtgaaatcccgtctcgactaaaaatacaaaaaattagccgggcgtggtggcgggcgcctgtagtcccagctactcgggaggctgaggcaggagaatggcgtgaacccgggaggcagagcttgcagtgagctgagatcgtgccactgcgctccagcctgggtgacagagcaagactccgtctaaaaaaaaaaaaaaaaaaaaggaatggaaaaggccattattacctcccctgtgctccaggatctacagtgtagctgggaaagagaagtttccaggagggaagactgccatgaccaagtccaaaggaggacaatgttcattcaaatgttcaatatgctcatcttctgacccacagctaccgttctggaaatcgatcctagagaatacttagacatgtgcataatgctatttgcaaggactttccctactgttagaaaacaaacaaacaaacaaaaacctattaacaggcaactggttaaataaatgagggtccttccatactgtgggataccaggcagttaaaaataatgaggcgaaacacccaaaacgataagacagacctgtatagacaataaataaatatctgctgttaaatgagaatagcaggcagaggaaaaatatccctgtacaaaacaatcctgtttatgtaaaaggaaataatttattcaatcaatattcactgaggacctaccacatgccagatactgtggataaaaaggcatgccacacagagcccctgtcctcatgtaacacacatagccagggtggataaataaatagaaaaaagactgaggctgggcacagaggctcatgcctgtaatcccacgactttgggaggccgaggcgggtggatcacctgaggtcaagagttcgagaccagcctggccaacatggcgaaacccccgtcactactaaaaatacaaaaaattagccgggcgtagtggcgggcgcctgtagtcccagctacttgggaggctgaggcaggagaatggcgtgaacccgggaggcggagcttgcagtgagccgagatcccgccactgcactccagcctgggcaacagagcgagactccgtctcaaaaaaaaaaaaaaaaaaaaaaaaaaaaattagccgggcgtggtggtgggcgcctgtaaatccagctactcaggaggctgaggcaggagaacagcttgaacccgagaggtggagactgcagtgagctgagaccatgccgttgcactccagcctgggcaacaatagtgaaactccatctaaaaaaaaaaaaagaaaggaaacacacacacacaccacacaccacacacacacacacacacacacacacacacacacacggaaactcaccattcaacattcctttgattcctgaagagctttggtattaaagagtttcccatgaaaggtctggacagtcttagagaggccatgcttagtagtgattcttggccctggctaaacattagaatcacctgggcagctttaaaaacctcccagtgtccaaattcaccccagaccaattaaatgagaatgtttgaggatgggacccaggcatcagctttttaaagatctccaggtgattctaatatgcagctaacatttgtaaacctctgctctaagttgttggatagcaggggaagtgggctagttgtaaaacctctgtcaaccagctgtgtgatcatgggcaagttgcttgacctctctgaactttattttccctgctctaaaatgggatcataccttcttcacatgatagaatgaggcttattgagaacattatcagaaagagctcagtcaattgtaaagcatgatataaatataagataatattttattctctgacttggttatcagctcagaagtaataggtggagctgggggtcaggcagagcaatgttgagttaatggttaacagagagaaaataaaagaagctgattggctggaataggaatggcagagagaagatcaaagggccccctaaaccatttgcactaaggcaggatctacccctgtaggattccagggtgatgctaatgcctgagattacatcttcatcttattcctaaagctctgttattttctgtcttttttttttgagacagagtcttgctctgtcacccaggctggagtgcagtggtgcaatcttagcttgttgcaatctccacctcctgggttcaagctattcttgtgcctcagccttctgagttgctggaattacaggcgtgcaccaccatactcaactaatttttgtaattttagtagagacagggtttcaccatgttggccaggctggtcttgaactcctggcctcaagcgatccacctgcctcggcctcccaaagtgctgagccactaagccgggccaagctctgttattttctcactgggtactgccagttatgaagagccagagatggcaactgtctgggtgagaggtctgaccagatgggaaggagctgaagagattcttcaggctctgctgggaagctttcagccagacagggtcccttccctggagtcaccctcaccagcaacttaaagaatgggaaattctcctgggcttgaacacatgggcccgtcaggccaggctgctggccctggagactttgtgaggggctaagcctgccctggtgaggaggccaagggggctgtgagcctgggctttccctgcccttccttaacaaagaccatcgccctcccaccctctgagtaaggaggtcaacacacaattgtgcagcagcaagcagagtggaaatgcttctgtgggactcagtctacctccagctgagtgccctcaactcttctactcagactttccctttcaacccaccaacccttcatccttccatagtgtgctcagtaatggatgttgagtggctgagaaagtcctaacttgcaatgagctccattcactgatagatcttgacatttcatgatgacagttttttttttttttgagacagggtctcactctgttacccaggttggagtgcagtgacacgatcttggctcactgcaaactccatctcccaggctcaagtgatcctcccatctcagcctcccaagtagctgggaccacaggcacctaccaccatgcccagctaatttttgtatttttcgtagagacaaaattttgccatgttgcccaggctggtctcaaactcctgagctcaagcaatccacccacctcggcctcccaaagtgctgggattacaggtgtaagccaccttttttttttttttcttaaaaaaaaaatcttttgctgggcacggtggctcacgcctgtaatcccagcactttgggaggctgaggcgggtgaatcacctgaagtcgggagttcgagaccagcctggtcaacatggtgaaacctcgtctctactaaaaatacaaaaattagccaggcttggtggctcaagcctgtaatcctagctactcgggaggctgaggcaggggaaccatttgaacccaggaggcggaggttgcagtgagccgaaatcgtgccactgcactccagcctgtgtgacagtgcgagactccttctcaaaaaaaaaaaaaaagaaaaaaaattaccttttatttgagacagggtcttgaactcctgggctcagtgattgtcctgcctcagcctcccaagcatctgggattataggcaaatgccagcacacccggccctttctgtttttaaacaggtgtctgatttcccacctccattccttccacagcccagagaggtaggacatcaactcttcagttttctatctactcacaggtttgatctttaacctctcaagaacaataagccagagaaacagagataagcgttgagttgggattcaagtttacttcagctgtttctgcctgatccacacatcctagggctccttcttaagtagttccttgcaacttaaagtgtatccaaaagtgatactcccttctttttttttgagactgagtcttgctctgtcgcccaggctggagtgcagtggtgtgatctcggctcactgcaacctccgcctcctgggttcaagcgattctcatgcctcagcctcttgagtagctgggattacaggtgcccaccaccatactctgctaatttttgtatttttagtagagatggggtttcaccatgttggccaggctggtctccaactcctgaccttaggtaatccgcctgcctcagcctcccaaagtgttgggatcacaggtgtgagccactgtgcccgcctcctttttttaattttgaaaatttcaagctttcagaaaagttacaagaaatagtacaatgaacacttgtatatccttcacctagattcatttgttgctagcattttgcccatttgctttatctctcctcctctgtgtttgtacacacacacatacacacacacacgcaaacattttttaaaaattattttaatttttggctgggtgtggtggctcatggctataattccaacactttgggagcccaaggtaggcagatcacttgaggccaggagttcgagaccagcctgggcagcctgggcgaaaccctgtctctataaaaaatacaaaaagtagccaggcatggtggtatgtgcctgtggacccgctactcaggaggctgaggtgggagtatcacttgagccagggaggttgaaattgcagtgagccaagatctcaccactgtgctccagcctgggcaacagagtgagatcctgtctcaaaaaaattattctggccagccacgatggctcacgcctataatcccagcactttgggaggccgaggcaggtggatcacttgaggtcaggagttcaagaccagcctgaccaacacggtgaaaccccgtctctactaaaaatacaaatttagccaggcatggtggtgcgcgcctgtaatcccagctactcgggaggctgaggcaggagaattgcttgaacccaggaggcggacgttgcagtgagccgagaacacaccactgcactccagcctgggcaacagagtgagacttcctctcaaaaaaaaaaattatttcaatgtttgctaaatattttgaaagttagttgcaggcatcatatttctaatattacttcaccatgtatcccctaagaatgaggacattctatataattacagtatattaccatgcttgagaaatttaacattaggctaagcacagtggctcatgcctgtaatcccagcactatgggaggctgaggcaggtggatcacttgaacccaggagtttgagaccagcctgggcaatatggcgaaattttgtctgtacaaaacttacaaaaaattagccagacatggtgacgcacacctgtggtcccagctactcggaggctgaggtggaaagattgcttgagcccaggaggttgaggctgcggtgagccaccatcatgccactgcactccagcctggatgacagagcaagacactgtttcaaaaaaaaagaaagaaagaaatttaacattaatactatattgtgatatatattccatattcaattttcccaattggcccaattatgtacttgactagctttttttttttttttttttttgagatggagtctcgctctgttgcccaggctagagtgcagtggcacgatcttggctcactgcaatctctgcctcctgggttcaagcaattctcctgccttagtctcccgagtagctgggattacaggcgcctgtcaccatgcctggctaatttttgtatttttaatagagacagggtttcaccatgttggtcagactggtctcaaactcctgacctcaggtgatccacccaccttggcctcccaaagtgctgggattacagacatgagccaccgtgcctgcccttgaatagctttttgaacagattgcatttagcggttcagaccctttggtctcttttaatctagagcagtttttcagaccattttgatcttttctgacatggatatttttgaaaagtccaagccaattgtgttaaaactataattactttatgctatttgaattctacacgtgatcttggtcctagagtgtaaattttatctgtgctgccaccaggtggcgcacttggtaggtcctggtcctcaaaaacccttgtgaaagggcaacttaaggcaagaaaactcgttttgtctcaatcaactaaggctgttatttggtaaagcatatgatgttggcagtgcccatatatttataaaggcacgtggtgtcttttccataatctggggatcttgctaattaggattatagtttcgtagacctgtaatgggtcccaagattctttctttttttttttttttgagacagggtctcactctgccagccaggctggagtgctgtggcgtgatcacggctgactgcagcctcaaactcctgcgctcaagcgatcctcccacctcagcctcccaaagtgctggtattacaggcatgagccgttgtcctggccaaggttctgcatttctaacaatggccaagtgattgtgatgctgctgatttgaagagcacgctttgagtagcaggggtttagaacaagcctatgaagaactataatctatttacaattagtggcttctgttcttgagacaaaatctcactctgttgcccaggctggagtgcagtggagccatcacggctcactgcagccttgacccctgaggctcaggtgatccccctgcttcagcctcctgagtagctgggatcacaagcatgcaccactccacctggctaatttaaaacatttttttggagacaggatctctgtatgttccccaggctggtctcgaactcctgggctcaagggatcctcccatcttgccctcccaaagcgccttgacctcccaaagtgctgggattacaggcatgagccatcatgcctggccactattatatatatatatatatatatatatatatatatatatatatatatatatatatatatttaaacaattttggcccccacagtggctcatgcctctaatcccagcgctttaggaggtcaaggcggacagatcacttgaggtcaggagtttgaggccagcctggccaacgtgctgaaaccccatctgtactaaagataccaaaattagctgggcatggtggtgcatgcctgcagtcccagctacaagggaggctgaggtaggagaattgcttgaacccgggaggtgggggttgcagtgagccaaaatcacgccactgtggtccagcctgggtgacagagcaagattctatcccacccccccaaaaaacaaacaaacaaacaaacaaaaaacaattttataactttatttggtatatttgatgattagcagttagttcacattcacaccgactgtagatttttttaaagtggtaacaggtacgtaggcaaccgaagtatagagcttgtttggtaaatctttatcttcattacattttctggacaaccgaacatggatacagtatgagacgttgcttattcctttggcccagacagctttgttgagcctggtatcaaagtgtgcatctggagttcccatctccttcagggcaagtttccggagctctttgagtgcctgaggggaacgcttcttgaagcccactccatgaatgcacttatgaatgttgatggggtattctcgggtcaccatctcgttgatggcggaatgacccttcttcttctcatcacccttctttgcaggagccattctgccgggcccaagttggaaaggaaattggccactattcttacatcataatcagtagtaaagctagtctcatcttccactacttcccctcttcctccctctactccagccccttggccttgcttctttcccagagggcctcgaccctagctttcccttctgcctcgcatgccattcccccagatatccttctgcttgactaatttccttgtctcctgcaagttcttagctcaaacctttcttttttgtttgtgttttgtttttgaaacagggtcttgctctgtcacccaggctggcatacaatggcgtgatcatggctcactatagcctcaacctcctgggctcaattgatcctcccaagtctccatagtagctgggactacaggcatgcatcaccatgcccagctaatttttgtattttttgtggagacggggttttgccatgttgcccaggctggtttcaaactcctgagctgaagtgatccacccaccttggcctgtcaaagtgaaaattcactttcttgatgaggctcacccagacatccttattaaacactgctgcctcccccaccccctcacaccctcccttaacttgcttgattctttgtttcctccagccttctccaccttctcacatatcatataatctacctcctgcgtttattgttcatttctgtctccccctgctagaatctaacttccatgagggaagggatctttgtctgtctattgtcttcactgatattttctgagcacttagaacagtgtctgcacatagtaggtgcatatgaaatatttgctgaatgaatgaagcttaaaaggaccttcaagataacagagtccaatcccctcatttcattgatgaagaaaggagccctaggtctctgggcaagacgaagatttgcccagggtcacatagactgtgggaatattcttcttattcttctaaatgaatacaatctaaaagccggactggtttctatcagttaattttctaagctctaattttattttattttttaatttgtgttaggtattttccccaaaggatctgaagcagtggacaagatgagaggtaatatagaatggaacagttaggagtccaaatggaagagatatcatctaaaggaagagggagtcagcctaacaggcactagatcatagttaattactctaatgggggcagaatttggctctgagtcctctggcagctgaggttaaacgggaagcacgtgggactccataacgttccttgtctgagctaaggaagactgagtgctccgcagggactcacatccaggaggaacctggtcctggagaaccctgtgtaatatccctttggcctcacattggacaatgtttaccaaaaaaacccaaagtcatggttgaagaacattgttgttttatctgcaaagactaagggtataatattaaatcacattataggctgggcatggtggctcatgcctgtaatctcagcactttgggaggccaaggcaggtggatcacttgaggccaggaattcgagaccagcctggccaacatggtgaaaccctgtctctgctaaaattacaaaaattagccaggcctggtggcatgagtctgtgatcccagctacctgggaggctgaggcatgagaatcgcttgaacccaggaggtggacgttgcaatgagccaagatcacaccactgaactctagcctgggtgacagaacgagaccctgtctcaaaacaaacaaacaaacaaacagaaaaacacattatagttcttatggttcaggtgaattatattgtgatgatccaactgaaaatgaagatgaaaactaaagaatctagaataaacatgtctaggaatatcttctgtaattatccaccaacgtctcaaatctttgacaaacattaaaccacaggcaactcatggtttggatttgttgaatacatcaacaaatgtttattgagtttctactataaaccttctcctctttcctttgctgactctctgcctggaactccccaggcccagctatctctaaggcagaggggaagagcacagagaccagaggggaagccagctctgtttcttcaagttacataaagtcttttttgtgtttctgagatagagtctcgctctgtcacccaggctggagtgcagtggcgtctctcggctcactgcaacctccgcctcccgggttcaagcgattctcccccctcagcctcctgagtagctgggatttcaggcatgcaccaccacgcccggctaatttttgtatttttagtagagatggggttttgccatgttggccaagctggtctcaaactcctgacctcaagtgatctgcccgcctcagcctcccaaagtgctgggattacaggcgtgagccaccgtgcccggccaagttgcataaagtctttgccagagtttatcattaaactctgactgcacatccagcaaattcaccttttctggccactaggaagttgtcctccactgcagagcagggacaattactgacttctgctgaagccttttcaaaaacctagttcttttacagagcctcagaacatcctatgaatattaactaatatattttaataaatgtcaatacaatttttcttttagaccccttgtcttttattattattattatttcaatttaaagattttctagggcatgtttttctgtctggtacacttgttacaagtagaggtcaccgtggtcatcttcaactgtcactccccaccaacccctccaccccacctcaccttgccaagttctgcctctgtctgtcacatatgtggcacacacatgaaatatttttctccacctggcattggttctgccactttgacaacccttggctgtgagagggcccaggggcttgactctgcaacatatcaagtggcctcagctaccaactgagaaacttcccccttgacaggcatgactagaaaacctgatttctctgggcaaagcctcgcacgccccagggaccatgtctgtctggttctgtgatgtatcccctgtatttagcctaggatctagacccttcataggcacttaagaatttcttgcaaacaggccaggtgcagtggctcatgtctgtgatctcagcactttgggaggctgaagcaggcggatcacttgaggtcaggagttcgagaccagcctggccaacatggtgaaatcctgtctctactaaaaatacaaaaattagctgggcatggtggtgcatacctgtaatcccaggctgggttctgccccagtcaaatcccaggcttttgcctgaatggcctggattagtctgtttcaaccacatggatcagttggttccatcttgaaaaaagagactggactggggctgccatgatcctgctgtgtgcaaagcactgtgggaagggctgccatctttgaggcctgggtaggcttatggtaggctttgcagaagaacttttagtctgtatcagttctttggggtatctgcttgcctggcatcttccacacagccatggaattgcagagcttagcataaaccagacgcttgctgtttgttgaataaactctgataagcaaaggcggcgtgttcaactatgtggagtcatgctgtcttaattttcactttttgattcagctatcacagcccatatgccaacatctccacaaaacagagagaagcacctgtgttagtcttggcacaagatcgctgtgagggcaggatgggggcatccttgttctccagtgcactgtgcacatgcgtgtgtgcatgtgtctgactgcatggacatgtgtgtttatgcacatgtctacctgtgtatactcggggactaaggtcctcacagtcacataaccttaagatggtgatgtgaggccaggtgcggtggttcacgcctataatcccagcactttgggaggccgaggcgggtggatcacgaggtcaggagttcaagaccagcctggctaacatggtaaaaccccatctctactaaaaatacaaaaattagctgggtgtggtggtgggcgcctataatcccagctactcaggaggctgaggcaggagaatcacttgaacccggggggtggaggttgcagtgagccaagattgtgccactgcactccagcctgggtgacagagtgagactccatcttaaaaaacaaacaaacaaacaaacaaaaactattgcaaagaccctcgcaaaaggacaaaagtgtccttttagcactgtaaattggtaaagaatacgccctcatgcccttgaggatcttttgcaatgactacagggtcttctagatgttggatccgcttcctgagtagacctgtaacactagaaagggaagcctcctacaaacatctcacaatctagcaactttccccttgacaggcatgaccggaaaacctgacttctctgagcaaagccttgcaagctccagggaccatgtctgtctggttctctgatgtatcccctgtacatagcacaggatctagacccttaataggcacttaagaatttcttgcaaacaggccgggcgtggtggctcatgtccgtaatcccagcactctgagaggccgaagcaggcggatcacaaggtcaggagtttgagaccagcctggccaacatggtgaaaccctgtctctactaaaaatacaaaaattagctgggtatggtggtgcatgcctgtaatcccagctattcgggagcctgaggcaggagaatcgcttgaacctgagaggcagaggttgcagtgagctgagattgcactgctgcactccagcctgggcgacagagcgagactctgtcaaaaaaaaaaaaaaaattcttgcaaatatactcaataagatgaggctactgagtggctggttaggctcactcaccagctatgctatccattcctgcttgccagcctcaaagaatatgattaaaagttttatatagagggcatgacttatcaactccaaacttggttttgcgacaaacatcacattatgtcactgtcattaaatgaaagagaatctgcctctgagctcccattctgccagactattgggaaagttaatgtttgcctcaattggaaaatccctccttccctctagggtggcacaagaatctggaaggctcctgtggttcctagaaaacagaggaaggggaagggactctggttatggtcactgttcaagctccttgaagtccaggcttccaaggtccacagaaggcaggtggtccactggctcccggccacatgaggtgcatgggatctctgccaaggctgtaagacccagggcctggggtccagcctatctgggtacccagggcctgtagtctagccttcctgggtgccccaggcatcagccatttccctgacagactctccatcacctggaggcagagagtggatccctgcagctttctctttctagttttggggacactttattatctgctgctccacctctgcccattcctgctctacaacctctcctggggtgagaagcacacacaaactgggatttctagaggtctgtgtggcagcagggacaggaaggatcccagggagattaacagcaaattaattctgcaaatggccctgccacaggggcccaatggaaggacagcctgcctcaaatctaaatcattgtggtcattctctaaataatcaaaacctcaagtgtttaatctgcaaatgccaagggtctattgaaatgactgtagtcaagagcttcctgatgaaaagaactttttatttttttatttttatttttattttttatttttttgagacggagtctcgctctgttgcccaggctggagtgcagtggtgcgatctgggctcactgcaacctcttcctcctgggttgaagcaattctcctgcctcagcctccagagtagctgggattacaggtgcacaccaccatgcctggctaatttttgtatttttagtagagacagggttttaccatgttggtcaggctggtctcaaactcctgaccttgtgatctgcctgccttggcctctcaaagtgctagaattacaggcatgagccaccgtgcccagtctgttttttatttttatttttttgagacagagtctcactctgttgcccaggctggaatgcagtggtgccatcttaactcactgcaaccttcacctcctgggttcaaccgattctcctgcctcagcccccccaagtagctgagattacaggcgtgcgcaaccacaccccagctaattttttttatttattttattttttatttttagtaaagacagggtttcactatgttggtcaggctggtctcgaactcctgacttcaaatgatctgcccgccttagcctcccaaagtgctggattataggcgtgaggcgccgtgcccagccgaaaagaacttttaaaatttgctatctttttcatcttaaactaaccctgccagagacaccatctgcaaactgagctcgtcttggcccagggatacacacttttaatcaacggctggcggtgtgatgggcttctagagacggtgttaggttccgctttagggtctgtcgttgaaaggcactgaaatccactctttttcctttcctagaatccagtcccagactctgtagaagtcttgggaggagactgggagatttcctcatgctgcaaattctggcccaaacaatccagtccctgaggagggtgtgttggtgtaccagaaactgatggaacagcacccggcaccatgccagaccctcctgtgccaagaggttccaggaaaatgagcatatcctaggattgggaggaagtaaggcagcaactggggactttttcctaatgagtccaataaatccttggaaaaataatccaccgagggtcaaatatacatagaaaacaactttgaaggcttttggaggcttttttccctaaaaagagagaaaagtaaaaaatattccaggcattggctttcaaaaacaaacaaacaaacaaagaacaaaacaaaacaaaaaaaccaaaaaacaaacaaaaccaagaacaaccctgggaatataaaattcttcaagatatgcaagaaacatataaacttcaggccaggtgctttgacatgcgcttgtagtcccagctactcaagacgattgtttgagcccaggagtttgaggctgtagtgtgctatgatcacacatatgaacagctactgcactccagcctgggcaacaaagtaagacttcgtctctaaaataaatacaactaaattttaaaagagaagtttataaactttagttatgtattctggccaattaatgggagggagacaaagagaaaaactgaactagaggagaaaaaggaagggaaaggaggaagcagagaaagaatgagagaggagagtgagggagaactctgaagaaggccagagaaagaaaacaacaggccgggcgcggtggctcacacctgtagtcccagcactttgtgaggctgaggcgagaggatcacctgaggtcaggagttcgagaccagcctggccaatatggtgaaaccccatctctactaaaaacacaaaaattagctgcgcgtggtggcacacgcctgtaatcccagctactcgggaggctgaggcacgagaatcacttgaacctgggaggcagaggttgcagtgagccgagattgcgccactgccctccagcctgggagacagagcaagactctgtctcaaaaaaaattttaaaaaaggccgggcatggtggctcatgcctgtaatcccagcacgttgggaggccgaggcagtaggattgcttgagctcaggagcttgataccagcctgggtaacatagtgagacctcatttccatataataaataaataaaatagaaaagaaaacaataatatttcagagatgccgagacacaaagcacaagagaacagagcacagtgagagaacactggcctgagaaggctcaaaagatgatgctgagaagatgatgttatctgaaggaaaatcaccatctttctgccttccgatttacatgagcatcttagaaacctgggaagtcagagctacaaggacctgagctcgtctagtccagtcttttctgtactgggttgaatagtgtcaccccaaaatcatatctgcttggaacttcagaatgtgagtttatttggagacagggtctttgtagataatgttagtgaagatggggttgtattggattcgggtgggcgctaaatccgataactagtgtcctttttttttttggagacagagtctcgctctatccccgaggctggagtgcagtggtgcaatcttggctcactgcaacctccgcctcccggattcacgccattctcctgcctcagcctcctgagtagctgggattacaggtgtgtgccaccaggcctggctaattttttgtatttttagtagagatgggatttcaccatgttggccagactggtcttgaactcctgaccgcaggtgatccactcgcctcagcctcccaaagtgctaggattacaggcatgagccaccacacccagctctagtgtccttctcagaaggccatgtgaaggcacagacacgcatgtgaaagaatgccctgtgatgacagaggcagtgactggagcagtgcagctgcaacccagaaaatctcaagaattgccaggaaccatcagaggccaggagaggcagagaaggggtctttcctagagcctttggaggagcatggcattgctgacaccttgattttggacttcaggtgtccagaactgtgcaagaatagatttctgctgtttttagccagctggtttgtggtaatttattatggcatccctgggaaatgatgaatacattttcctttgcaggagaggagccctaggatgtgtgacacatccaaggtcatgtaatcgactggtggccaatcccctattccaatttagcttttatttttctttaagaattgtatttgcggccaggcgtggtggctcatgcctgtaatcccagcactttgggaggccagggtgggtggatcacttgaggttaggagtttgaccagcctgaccaatatggtgaaaccccatctccactaaaaaaatacaaaattagccgggtgtggtggcacatgcctgtaatcctagctacttgggaggctgaggcaggagaattgcttgaacctgggaggcggaggttgcagtgagccaagatggtgccactgcactccaacctgggcaacaagagcgagactcaaaaactaaacaagcaaaaaagttaaaaaaagttaatttgctttccagcattgtcatcctttctgaatgtggaaataaggtttcttttctattgccaaagttcattctgaagaaagaattcttttcctattgaattatgaaatatatatgaagggacaatttgggctttagaaatactttggactctgaagtttttcaatagatttactgctggttctttgatattccaaaatattctcttttttgtctttttttttttcttttttgtggagaatggggtcttgctatattgcccaggcaggacttaaactcctgggctcaagcaatccttctgcctctgcctccctaagtgctgggattacaggcatgagtcactgcacctggtctggtattccaaaacattctaatagcttattacttttgagagatgagggctacccccttcaaatgttgaaatcaccatttgtttccttattctgagcaattttctgaaggtaagccgagtcttgctggggatattgaatgtaaaactgtctttaaagtagatcctttggtaagaaatgtattgatcactattttggggttttaactgacatcaaataatatgaagcatatgtgagtttttaattatttagaagttcctaacccttttttggaccctatctcccttcaagaaactgataaaaggccaggcgtagtggctcacacctataataccagaatttgggaggctgaggcaggagttctatcacttgagcccaggagtttgtgaccagcctgggcaacatagtaacaccctcatctctacaaaaaaattaaaaattagctgggtgtggtcgtgggcacctgtggtcccagctttgggaagctgagacaggaggattgcttgagcccgggaggtcaaggctgcagtgagccatgttcacaccagtgcactccagcctgcgtgacagagcaagactctttatctcaaaacaaacaaagacatggataaaagctatggattctctcccatagaaaactgcacaccctcataaccttttgcacctactcttttttttttttgagacagagtttcgctcttgttgcccaggctggagtgcaatggctcgatcttggctcaccacaacctctgcctcccaggttcaagcaattctcctgcctcagcctcccgagtagctgagattacaggcatgcaccactacgcccggctgattttgtatttttagtagagatggggtttccccatattgaggctggtctcgaactcctgacctcagctgatccacccacctcagcctctcaaagtgctggggttacaggcgtgagccaccgcgcccggctgcacctactcttagagaattctcaggccccacgccttaccccaacttctgttaccagtggtgaatccaatgggtctgcagcaaacttgatgcttgccttctcaaagacagaactcagctgaggggcagaggtggttttaagtggttttaaggcacagggagagaccaaggcaagttttagagcaggagtgagagtttattaaaaagttttagagcaggaacaaaaggaagtacactacacttgggtcaggcaggcaacttgagagatctaagtgccctgcctgacccttaacttggggttttatgtatttggcatagttctgggatttacgtctcatctcccctgattcttcccttgcagcaggctgtccgcgtatgtggtgacctgccagcacttggaaggggtcgcatgcacagtgtgattactgaagttgcgcgcatgctcacttgaggcatttttccccttaccagtcgtgcgttcccagaggaaggtaggtcatatactggttaaattccgccattttgcctcttggtgcgcatgctccaggctgcttgcccagctcctgagatcttatcgggaagcggctgatcaccagatcagggtgttttgtatctattgagagactgtccttgcttggagctggctgcaaccaattattattttacagagacagtttaacaaccacctgaccatcacctgatggtagcctgacattcctgtgggggccctcacctgtcctgctcatgtttgcctagctccctactctaacatttccactctgtggaccccaggttgagatcttctgcagggaagactgtcctcaaatagcctgctggggagacatctccttcccgtttacctttccatttgcccttgcggtgttaggcaaaggctgaagctggcctctgtggcagagggtttcttcccaacacgccaatgacgctggtggagagtcttaaaaacagctgtgctggggagagttcttggtgtgtacctttcagagacctcctccttaagactctcaaagactgagtcaggccagtgggagcctggcagcaattcttaggggacagtgacagctttttgaggaggactaattggcttctagggctggaggccacttgggtctgacagactgccctgctgccatccctccagggcaccccccactcccttgcctcagggccttcctgcacttcttccttttgtcctcaatgttcttcaccccaccttttccactggtaccctctgcctatggtcaaggctttggtgagacccactttcctcttagaccttcctggatcccccaaagtctgtgttggaagcccctcccatgtgcccttgtttgagcttttaattttccaccatgacgcttgtcacactgctttgtaattggctctctgttagtctgcatctctactgggttgtaccttccaggaggacagctgccatgtgactcttgtaatcttcccaccgccaacacccagcacagcgtcaggaacacagagcatgatgagcacaagcttgttgagcaaacagacaaataactggatgcttctgtgcagagtttctcaacctggccattattggcatttgggacttgatcatgcttggtcgtgggagacggttctgtgcctgtaggatgtttaggagcatgcttggtttctacccaccagatgccgggagcacacccacccagctgtgacaaccaaaaatgtctccagacaccattccaaaaccagcgggagacaaaatcgcccgacagtcgttgctttagtgagtgaatgttgacctaagcgtcacttcgcctgtcttgagtctaggtcggggagtgggttcagttagccaatcagagaacgctgatggggcgaccagtatatgctcatgaaatgggtggctgacctcttggggtcagaagagggaaaagttttactgtgtgttggctaaggaccattttaagtccttcagtgaccgattaccacatgagaacacaagagggcgctctaactaatgagttccgcggccgagaaaactcctggagtgggtgctcctgggatgcttcaggtttagacaccggggttacggcagctgccgaggaaggctaaagccagcgtcctggattcagacagaccttttagccattaaatccactaagaaagatccctgcgcatgaagtttcctcctcggaaatataggcagaagggaaagtaattttaaactcatgtgtgctccacaggccgggggcggtggctcatgcctgcaatcccagcactttgcgaggccaaggagggaggatcacttgagcccagaagttcgagaccagcctgggcaccatggtgaaacctcatctctgcaaaaaaaaaattaaaaattagccagctatggcggctcacgcctctggtcccagctacccaggaagctgagatgggaggatcgcttgagcccaggggttcgaggctgcggtgagccattgttgtgccactgcactccagcctgggcaacagagcaagcccctgtctcaacaaaacaaaacaaaacaaaaaattcagtcgtgctgcataagtaaggcaccaggagtaggaatagggtctttgcagctcccgtggcaattgcccttctctggtggtggcaagggactaaggaactccctggacacaggggatctggctgtccccagatcatcaacagagacatgaaggtcgttagaggtcgtctgatcctttgacctcaatctgagcccaccactcagaaaacctggaaattgtatgacattttcgtgatacaactcggtgtgtgtgtgttggggaaaggaaccaacagctttcatcatattgtcaaaagagtctaggctgggcatggtggctcacgcctgcaatcccaacccaaaggcctgtggagcacacatgaggacaaggcgggcagatcaccaaaggtcaggcattcgagatcagcctggccaacgtggtgaaaccccatctctactaaaaatacaaaaattagccaggcgtggtgacatgtgcctgtaatcccagctactcgggaggctgagacaggagaactgcttgaacccaggaggcggaggttgcagtgagcagaggttgcgccgctgcagtccagcccgggcaacaagagcgaatctccgtctcaaaacaacaaaacaaaaacatagacctgctcggttctctctgtgacttcagaggcccaaggagtcctcagcactatagatgcatgtggcccctcagaagacaacatttcacagatctgcaaagagcaaaggtcaaatttatttaatacaacatccacgagggtccctgcagctgtgtcactgaggcaaacaggaaaagtgattttggctaggcgtggttctcatctgtgaaattccacagcgcaatgacagcagcctctctcccacccactcaagacactgtcaggaatgtcttaagacctcaggagaccacttctttagcaagcaattttgttttttgttttttttgagatggattctcactctgtcactcaggctggagtgcagtggcgcgatctccgctcactacaacctccgtttcctgggttcaagcgataatctcacctcagcctcttgagtagctgatactacaggcatgcgccaccacgcccggctaattcttgtatttttagtagagacagggtttcatcaggctggtctcaaactcctgacctcaggtgatccgcccacctcagcctcctgaagtgctgggattacaggcgtgagccaccttgcctgccctggcaaggaatacatttttaaaaattagtaagaaacatacacatttcaagttttcaattaagaataatatttgctgatggcaccatcttcctgtctttcagccttcagcatggtagaggaaaagagaaagagtgtagacaaaaacagttgaagaacatctgtgcttgttccaccttcattttctgttttgtgcgttgcctgaatgaacggtgtcttcaggttggtatttcacaggcggtgctcccaagtagtctggttttcccatttgtggagggcgaggtcatagaggggacagggggaggctgtctggtcagcactgtgtatttccaaagaacaaggactagccaaaactacaagcctttgaaggaccaaaggaaaagagaaaaaaccagcctctaaccaggccatgcgctagaaatgattgagtataaaaaagaaaattggtttctgtgtatgagggtgcatggaaaaggtctttatctctgcacaaaacaaaatattcaagtttcagaatatcccaatggccttgccctggatctcctcttgtgctcttccaatttccaaggatgttccaacttggtggaaggagggtatgtgggaaattcaacagcccctctgtatctctttctacccaacattaacttagcaggatggatttaagaaccggcagcttagcctgaggaattgctgtgttctgtgggagcagggcaggttcataaataagtgcacagaggtcttgaaatacagggattatctgttcttctcggaacatggatgtccttccagggatgtgcatctggccttgctgtctaagttccatcaagggagccttccgttctctgtagcgacaagaaacaaggcaagttatgatcacacctctcaagattgaagattgccctggtggagagaaatgcaaaatgacagcacttctcaaagaaaatgcaaagcagggctgtcacacactggtcccccaccctgcagggttctctctgtgacttcagaggcccaaggagtcctcagcactacagatacacgtggcccctcagaagacaacatttcacagatctgcaaagaataaaggtcaaatttacttaatacaacacccaccagggttcctgcagctgtgtcactgaggcaaacagggaaagtaattttggttaggtgtggttctcacctctgaaattccacagcacaatgactgcagcctctctcccacccactcaagacattgtcaggaacgtcttaagacctcaggagaccacttctttagcaagcaattttttttagatggattctcactctgtcactcaggctggagtgcagtggcgcggtctctgctcactacaccctccctctcctggctcctgcccgtatgtatttctccttctctccatgcctgctctgtagggaccatagcctctgtccctgcatacatgttggacatcaatcacatcagtccaccaagtaacttcatcaagcacccatgtacgcccagcacagcgtcccaagggtgccccacttacccacagaagaagaaaggcaactttgtaagagatctgacttctagctccagttctgtctctagctaacgtgagatgtacccgtttgaggcctgttttttaattttgaaaatgaaggactgaacttagatggtccaactgaaatgttttaaaatgatatgattctaccttaaaaagagaatgaaattctgatatattttcaacacaggaaaaccttgaaaacgttatgctaaatgaaataaggcagacatgaaaggacaaatatatgattccacttatgtgatgtacctcaaatagtcaaattcatagagacagaaagtagacagtggttgctaggggttgctggaggggcaatggggagttagtgtttaatgggtacagtgtttcagtggctgctctgcctatggagtagccattcttttgtttctttacttctctaataaacttgctttcacttaaaaagaaaaagctctggagatggatagtggtggtggttgcacagcaatgtgaacggacctaatgcaactgaattatacactttaaaatggttaagtatacactggaaaatggtgaatttgccgggcgggcgcagtggctcacgcctgtaatcccaacactttgggaggccgaggcgggtggatcatgaggtcaggagttcaagaccagcctggccaacatagtgaaaccttgtctctactgaaaaatacaaaaattagccgggcgtggtggcgtgtgcctgtagtcccagccactcgggaggctgaggcaggagaatggcgtgaacccgggaggcggagcttgcagtgagccaagattgcgccactgcactccaacctgggcgacagagcaagactccgtctcaaaaaaaaagaaaatggtaaatttaatattatgtatattttatgacaattaaaaaaaaggattcctggctgggcatggtagctcatccctgtaatcccagcactttgggaggccaaggtgggtggatcccctgagtttaggagttccagaacagcctgggcaacatggcgaagccccatctctatcaaaaatgcaaagaattaggcatacatggtggtgtgcacctgtagtcccagctactcaggaggctgaggtgggaggatcacttgagtctgggagatggaggttgcagtgagctgaaatagcacccctgcactccagcctgggtgatagagtgagacttcatctcaaaaaacacacaaacaaacaaaaaaagcaaaaaaacacccacaaaaggattcctggattccttctgccatcctgtagtgctctttaacagcttcaaatggtatttgtgtcacctatccacctatcagtgcctggacccttatctgacccacactgttctctatgctggggatgcaagaagctgtccccaagaattttatattgtatcaattattgataaacaacaccactatgaagtagaaggtataagaggtctcaacaaactgcagaaggggttcagaggcactgagagggctctgggctgggcagtgggggattcacagaagcaactctggagtcagcctaaagattggattttgacaaatggaaggagcccttggagggaaaaagagcagggcctgctgggagataccagagtagaggggggccctgggcaacagtgggccctgaagagcaggcagcacctaagtccactattctggaccctccatgtgcacaggacactctgctgcaggtggaactcagcaaggcagaagctggagatggaggatgacccagggtcttgggacctccacagccagcctggctggcttcctgagggtgagctgggatagtgtctccattttgtttcagccctgctgggtccaaggacccttggggaacaggatgcagggccgaggtgccccaactagaaagccaaggctctggcccctcctctgccaggagagccccatgcaagtgggccaagcaagccgtgctggccccagaggctggaggcctgccagcgccggcagccaccctgccctatttcctctgctctgcctggatgggggagacatgactctggtgtccagcctttctgtgggccccagaccaagtccctccccagacacctccgctctctctctgtgggggcagccaatgcctggggcaccattgcagaaccaaagccacagacaggaagggctgggccacaatcaacagggccttagggattttgaagtaaaggttaacacgctcacatccaaggtctgggcttgctgtgcttaaatcagaagccagccatcagccacccaagtgcagttgtgaaatcgccctgccttgtacccggaatatggtgtggtctccctcaaaggtcattttgatttcaacacaccctgggatctctagttcctgcttctacaaagtgctcctgtgggcacttgcaatagaccaggtctatgccaggtgctcattcaacccttgcaacaaccaagtgagggagtttatgattcccagtttacagattaggaagtagaggtcttgagaggccaagaaatttgcccatggtgacatggctaagaagtgggaagtcaagtgttaatgtgggtctctgattcctaagtcaaagcctggccttggttgaatcctatgccttgggtaagcaactgctacattctccatatgtggcagggtcatttcatggccaaatcaagttaagtcccccatccacacctactattgcccaagtgatgaaaagagcttgagatcaaccagcttttatatggtggtttgcagcttgcagcttttatatggtggttgcagttgctcatttcatccttaaaatcctaataggttgctcttatcatcattgtcatcaccatctccactttatagataaggaagcttgagcttgaggaagacaggctcacccaaaagacagctggaaagctggagctcccctcccatcccctgatcctagcacctggacagtttccactgtagcccagctgcctcctggcctccaggaaggggggaggcgagctatagctgccaattgcctttctttctgtaagaaggcagggtcctttccaagatcccaagactctcacaagtccagattcacccctttcatttaagtacagggtgttctcttccatgctatctgtctgcgtcggccacacacacaatttataaacaaggtaaaaatggcagaggaaaaatgaagtcagaatgtgccattgaagcaagtcaaacaataccaaattagtctttggctacgtggctatctcattgttaagatatttcctccaatgttttcagaggcaacggccattaaacaactgggaatgatcgccaggtttgatttcaggaaggaaatctcctcccatttccccactgggcaattcaattaattttctcctgacccacaccagctgattattagggaagctatacctgcttcttttataaacaaaacccatttgcttaaaggttcaaaattcctttcccaacggctggaaaccctgtgctcccatcaaatgactctattcttttttctggggggacaggaccagtcatgggtgagctctcagaaccatcctgggagcagactttgaggcccaagggccagcttctgggtaaagttctgtctggcctggagctccaagcctttgtccagagacaccctttggatccaagacaaagtaaataagttggtcctacagggtgttttgggtggacccagccatgtttatcgcttcaggagaacacatctgtgtcccgcactgcccagggagcaaagacctcattttccactctctcaaagccattattgctgggacagcaacttcacatcttggagggagtctctgtcgtgacagaggactggccgcagagtatagaggcctgggctctgttcctcactctattagccatccaggtgaccccagacacgctattctaccagtgcaggcctcagtttcctcatctgtaaattgggctccttgtcccagtgacacgatagtctctgatttcaggagtctgagtgggttttggctaggaaaaaaaacaaccattcatttcattcctcttttccttaaattcatagctttcttccataaaaagaatgtcagtggcttcctgtctgtcaaaggcataatgagctctgttttacaagagtccagacatgggcaaaacaaaggaagccaggggcccactggaagagctaccagaaatcttgctgaaagttcttcccagacctaaaagaagtttatgcggcaaatgcctcatttcttcagatattagctgcccagttaactcctgcattgctgggtagctcacaaaaaggttgggattggaagacacgtctttgcaaaagttgaacgtgggcctctgtgtctttcataaaccctcccatctgccaaatagcagattcctaactccatttcctacagaatgaagcttcttaacaaggcatgtaaatcctttggatttaagccctgacttatctttctcccgtcacttgtcactgtcacactcttcttttcccatcccacactgcttgaaactggtcatccctcacccttgtgctcctgctgatctttctccctcaatgctgccatcactccattcattcttcatggcccattccaaatgattccttggggaagaggccactagctaggtctctgttctgtgttcccataggctctggcatagctcactttgctttatgataagtgatcacatgtctgattccctcatcagaaggtgaactgaggtcaagaagcttgggtgtctcctgcagctgatggcctggtgtgtagggggtaattagaatcggctaaattgcaatgagctgtcagctgctccactcctccaagcatacaccctagatctgcctcacttccagagcctagactttggcgttaaacgaaatgtgtgctttgcttgtttggcgctaagcaccccagagtcccaatcccttcacgtgtgggctgagatgtaatgatggaaattgcaggagagaatattcgaaatcagaactggccaaggctagtcagagaagcccagggcttctggtctgaaacagactagggagcggggaagaattcatgtgaatgcaggacgtgggtgagtctggaaatatttcactgttcagtggagtacttttaaatataatgtatatgaaatgtgtacttacagagtatctgctttccacggcatctacaaaacaaaggatgacatggcagtgagcaacgcaaataacccagttcaactgccccaacaacatcacagggtcaggagcaggtcgagaaaagagggaggaggcgagagccaggagacatcagccggcaggtgcccttagaggtttatggctcctttgtgcaagacagcttccccgggaccctctagctccacatgacatgcgcataaagtccctggcacttcatttaaaattttctttattttttattttttgagacagagtctcgctttgtcactcaggctggagtgtggtggcgccatcttggctcaccgtaacctctacctccagggaattctcctgcctcagctggcactatctcggctcactgcaccctccgcctcccagattcaaggaattctcctgcctcagcctcccaagttgctgggactacaggcgcacaccaccatgcctggctaattttttttgtattttttgtagaaatggagttttgccatgttggccagggtggtctcgaactcctggcctcaggtgatctgccaaccctggcctcccaaagtgctgggattacaagtgtgagtcaccacatctggcctcatttaacattttaaacagttttttagaaatgtagtatcacggctgggtgtggtggctcatgcctgtaatcccaacagttggagaggctgaggcaggcggatcacctgaggccaggagaccagcctggccaacatggtgaaatcccatctctactaaaaatacaaaattagccaggcgtggtggtgggcacctgtagtcccagttactcgggaggctgaggcgggagaatcgcttgaacctaggaggcagaggttgcagtgagctgagatcgcaccactgcactccagcctgggcgacacagcaagactccatctcaaaaaaaaaaaaaaattagtagcacatatttttttaagaaaaaaatgaaaactatggaaagtaggaagtagcagataaaaatgatatctggcctcattctccaaaccctgttgatacttttttttttcctagtcattttccactacgatttggcttttttgggggtggggagcagttataattatacagtatatgccattttataacttaactttttcatataacatggctttataaactttttctgaaaacttcttaagcataattgtccaattagctactaaataattgttaaatggatgtacaactattgacttcaccaattccttactttaaaaatgtaggtgctttccaagtttttgctcttttcaataacaccaccggtatcctctttgggaataaagctatttctagatttcatactattttgtcaatcccttccaggagcaggctcaacagaggaggaggcagaagcattgccaacgctcttagcagatctgggcaactgtttccccttcccctcaggagtctcctctcaactgtgtgggagcccacaccaccttctttttttttttttttgagacggggtctagctctgtcacccaggctggagtgcagtggctcactgcaacctccatttcctgggttcaagcaattctcctgcctcagcctcccaggtagctgggattacagatgcccaccacaatagccgggtaatttttgtatttttagtagagatggggtttcgccatgttggccaggctggtctcaaactcctgacctcaggtgatccactcatctcagtctcccaaagtgctgggattacaggcatgagccactgtgcccagtctcacaccaccttcttggcaggcgccatgctgtgtttgcctggccctgccagtctgcagttgcgcaaatggtcccaaccggatgtcagcaagaggacagtgaggctgagaaaagccaatgagagcaggaagctctgcataggtggtgggtgatccctgcctgcattcattagagatggtgtttcctatgagaggcaagtgacgggtatggcttgcccttctggaaaggaccaggaccccacccaatggtcagtggcccacatgctggggcagatccccaaacagctgactgtggaccctgacttgaagacagagaagtcatggggacctcacctgctgcctgggggagaccccaagaggagatgtgggcattggggatggttgctgttctcgaaggtggtggagggaatggtgggagggccataagtcctcagtcttatcgagaaaagtacgccaaggggcctcagtatagacccagccccaagctcacatacagttcctcctggacctcgggcaggctcagggcctgtctgtcacagcgggggtcacaatccttctgtttctctaatttagaaatatcctgtttccccaagtccacctcaccctaacaccctgtcttatcacaagtccactgcccctcccccatagagggaacagagccagaagttcctcaggggccctttttctgtcctggctgggccagaggctggtgtcaacagccaaatgatgaatcagcccaacgctaatgttgagccattgtgtcaacttccatgcattgagtgaggttgaggacagcacccccaatgcaaatctgacctgcaaggacccaaaggaccccgtgattcctggaccctcctagtcccctaagggctctggaacctctttcccaacagcgaaagaacctcaagtaggcattttctaaagcaatctgaagacaaaatgtgaaaaactcaaatacggatggaacacttactccatgcacacttgcagttcttgtttttttggtaacagagcaatcatcaccaaagttgaattggaggtagcatccattttttcatggggatactttttcaccatcttgcacgctgaagtaggaaatgcctccccaggggcagggttggcagtgccctctggcctcactggctctgggcctcacaggatgggtggggactgatcctcaagtgctcttctcttcctcccataggagacttggcacagaggcctccttttctttggttctttctcagccatttcctgtcacggctactctcggcccagctagtcttggtatactgggtggcaggggatgcggtgaggaccagggtttctgcctccctaagaaacaccctggaagtctgaattccaggcaaatagaaagtagaaggtggactgggcgcagtggctcacgcctgtcatcccagaactttgggagaccaaggccggtggatcacttgtggccaggagttcgagaccagcctggccaacatggtgaaactccgtctctactaaaaatacaaaaattagctgggcgtggtggtgcatgcctccaatcccagctacttggaagcctgaggcatgagaatcacttggacccaggaggcgattgttgcagtgaaccaagatcgtgctattgcactccagcctgagtgacagagcaagacttagtctcaaaaaacaaaaaatagcaacaaaaaagtagaagatggaccattgagtgagtagattccgtgatggggaggtgggcctctggctcaacaggtagggctggtgcccagagcaagactcagcacccatccagagccacagtaatcaggtgggatgtgccttaagtcacctcccaagacagagggcaggcaaaagctggtactggagaggaaaaccagctctcctgttggaggagttgcaggaggtgaattcctctggccagggtttctccatggtggccctgttgaaattttgggctgggtggtgttttgtggtggggagggggctgtcctgtgcattgtcgcatgtttagcggtatccctggcctctctccacgagacgcagtagcattctcttctctgttcaccacgctatgacaaccaaaagtgtagtacttagtgccactgagctggatacttagagttaaaatggtaaattttatgtgatatgtgttttaccacaattttaagaataaaattgtaaaaagtaaaaaaaaaagtgggctgggcattgtaatcccagcactttgggaggctgaggcgggcggattgcttgagctctggagttcaagaccagcctggccaatgtgacgaaaccccatctctactaaaatataaaaatattttgctgggtgcggtggtgcatgcctgtagtcccagctgagtcagaggggcctgcctggggaggtggaggttgcagtgagccaagattgcgccactgcactccagcctgggtgacagagagagaccctgtctcaaaaaaaaaaaaaaaaaaaaaaggtggaaaaaaagcatagtgtggaattctaccatacatctctaggccacagagagtcaatagggaaactgagacacacaggatccctgccagtgctgtgtccatcccctaacgtggggaggcagctgagtggaaggcgcctcatgatacaacaattaaaaaaaaaaaaaaaaagctgtgcttagagccaaaagccaagactggaaagaccaggcagctcccccactgtctgcaagctttcccatcaaactcaagtcccccgggccagcgcccagctctctctcctcggccctggggctgctccttggaggcaggcctgccccatgccctattgcttatctaggggagggcttattttgtattactcagggggtgaaagggggtttaagggccagaactgtgccctttaagccatttcccaaaataggcagccctgaaatgctgcatgctagaagatgacggggaacatgaaggggaaaggtcagcaaagactccgctctgcacccagctggctcactgatctcacagacctaccccacactgggccccaatttttttttttgagatggagtctcactctgtcgcccaggctggagtgcactggtgcgatcttggctcactgcaagctctgcctcccgggttcacaccattctcctgcctcagcctcccatgtagctggactacaggcgcccgccaccacgtccagctaattttttgtatttttagtagagatggggtttcaccgtgttagccaggatggtctcgatctcctgacctcatgatccgcccgccttagcctcccaaattgctgggattacaggcgtgagccactgcgcacggccctgggccccctgttttattgggggtcactcaataccaccttccctctaataagcacagtgtttctgggttttacctgcccaccaatgctgaaagatccctccaggatttctggagggtgagaaagaccctactccttccaacaagaagcagagccttagcgtggcacaatcagaaaggaacatgctgcatcaagagtggttctcaaagcccgggccccagcgtgacggcagcagctgcgtgtggacacctgttagaaatgcacgttttcggcaccgctccagacctagtgaatgggaaattcacagggagtggggtgcgccaaactattgatgttttaataaagcccgaggaccactgacctgcctccagcccatacctcatctcacagagaaggtgaccaaggtcttgagaggctctatgacttgcccagggtcacccaggccacagtagaatattactcttcatgtttaaagtagataggatctacttaggaggctgagaggggaggatgcttgaggccgggggacagaggttgcagtgagccaagatcatgccactgcactccagcctgagtgacagagccagaccctgtctgaaaaaaaaaaaagtagacaaaagttctccaattatgccgataacatgaagcctaaactaagaaagatggaaaacagaaaagaatgcagtcaattggtttggcaacaaacaatggacagcaattggtaacaaaccaattaagagaaaaaaagagagggaacaggaaggctttgaagagcatggcttcagccaggccccctgggttcagtccttgctctgccactggctgtggaacaaggacaaattagttaacctctgggcccgtttccccatctgcagagcaagaataataatagaacccccatcaactgttagatgatcttggggattaaggtagggctccaagtgtctcacacagagggagtgctcaatacatattagctttaactgtgacagaggaggaagggacccgcccaaccgcaagataattagagtatagggagaaaacaatcaacatggaacaaaagaaatctgcagtctacagaggtggaataatatccagaggaaagagctgctgaagaatttggcaatgatgaagaatctggggatggttatgatgatgaataagaaatgatgatctggccgggcgtggtgtctcacacctgttatcccagcactttgggaggccaaggcaggtggatcacctgaggtctggagttcgagatcagcctgaccaatatggtgaaacaccgtctctactaaaaatacaaaaaaaattacccgggcgtggtggcagtagctgtggtcccagctactcaggaggctgaggcagaagaatcacttgaacccgggagctggaggttgcagtgagctgcgatcgcgccactgcactccagcctgggtgacagagcgaagaccctgtctcaaaaaaaaaaaaaaagaaagaaagaaagaaagaaatgatgatccttaacagctctgggctctggggaagacttgaacaaagagaggctgaggatgagtgtgagagaagcctaagcgggtgggttactgctggctgaaggatctggctctttggagaatcatctaactccccccaggcagagaggagggaatctctctgattttatgtagggagtgaaggaaaagagattacttggaagatgttttctattaaggaagtcccagagaatttaggagagaaattcctcaaatgggatgcctgctctttagcaaccagtaagaggaaaagaaagaaaagctgagcattcaggtggcgcacgcctgaatcccagcactttgggaggccaaggcgggcagatcacttgagcccaggaattgggcaatagcctgggcaacatggcgaattagctgggcatggtggtgcgtgcctgtaatcccagcttctccagaggctgaggcgggaggatcgcttgagcccaggaggtggaggctgctgttcactgtgatcgtgccactgcactccagcctgggtgacacagtgagactctgtcttacaaaaaagaaagaaaagaaaagaaagaaggaaggaaggagagagagagagagagaaagatagaaagaaggaggaaagagaaaaggaaagaaaggaaaaaggaaagaaaggaagaaaaagaaaaagagagagcgagagagaaagaaagagagagagagaaagagagaaagaaaagaaatcagccatgtcctgcaggctcctctcctcaaggaagcactgacaaacaggaaaccccttggcttccaggaccagaggcttccaggtgggttggaggcacagctgcaggcagctgcaggccccgagggctacagcctgtgcaagaaccagggctctctctaccttcacccctgggcaggttagagacctggcaggttccctaatggtctgccagtttagagacaaggttgtagagcgacagagccctgattgactccaggtggcccaggtggtgctgtgggagggtcctggtctcggagtcaggggactgctctagtagtaccctgggcaagacactgaactctatagggctcaagttcctcctgtgtttttaaactgaaattgattaagtgctcactctgtggcagggataatacagtgactgtggggataaccagcaccatctcccatgattctatctcatttaaccccatttgcatttaacagttgaagaaactgagtctctgaggggtaagacatcttggtcacagtaactcagctgattgggggctgcctcagaacggggactgggatgtctcccaggaaagcctgtgctctacaccgcctcaaatcctacaagagtgggttctacgatgcctatagtttctgcctgaggggtcaggttccaacagcccggactgagtaatctagaaccaacctggagaccccgagagaacccacttgaacagccagctgccctaaagcagatgaaggaaatcagaatatgccaccacaaaatatgcccctttggcataaggattgttttgagctggttcagatgtagaaggaagtcttcccagagcttgtttatctgactaaaagcagaaactacttcttcctttttttttttttttgaggcagattaacaagagaaaaacaaagagggtctctgtttttctcttgttaatctgtcttgtgtaatttgcagggccccagtcagaaaacctaagagagtaaaggaagaaaattaagttttttggaacccacagtctcattctgtcacccaggctggagggcagtggcacaatcacagttcactgcagcctccacctcccaggctcaagcgatcctcctgtctcagtctcctgagcagctgggactacaggcatgcaccactatgcccagctaatttttgtttttatattggttttttaaattttttaaaatttttttttttttttttttttttagagatggggcctcactgtgttgcccaagctggtctcaaattcctgggctcaagcgattctctcacctcagccttccaaagtgctgagattacaggcatgaaccaccatgcccagccctaaaagcagaaactcctaagaaaacacacctgctgtaaatgcccccataaaatatttgtggccacttgattgactttctcagtttgccactctgggaagccaaaaaccatctttcctttgtcttgtcatttgtctacaaatttattgctctttgttaagaagctttatatatttatatttatttttatttttttgagatggagtttcattcttgttgcccaggctggagtgcaatagcgtgatctcggctcactgcaacctctgcctcccgggttcaagcaattctcctgcctcaacctcccgaggagctggggttacaggtacatgccaccatgcctagataattttttgtatttttagtagagacggggtttcaccatattggccaggctggtctccaactcctgacctcaggtgatccacccgcctcggcctcccaaagtgctgggattacaggcgtgagccactgcgatcagcctaagatgctttatagaccccaagtgctaaccacccctttgagttactcatcattgatgtttctcctgtgtgatttgcgttatgtatgttaataaactctgttttcctcttgttaatctgcttgtccaattcgcagggccccagtcagagcacttaggagagtaaaggaaaaaaagttaagtttttccctagaatccacactaaggtgcccctcaccacctataaaagggcctccaaccagtagcctcagatgatcacagacttcgctggaggcctcgaggcagaggtggtaaggagctggcctcctgcagcgaggatccctgcagcttccaccttctaccacccgactttcccaaaccgaagacagtacacctcagtgatcaagagcgtggagtccactccggggaggaacgattctcaggggctggcttgctgcgtgatcttgggcaagcgtcttaacctctctatgccttagtatcctcaactgtaaaatgggatttgtggtgaatcccatggacaaatcccattgaaagacacgatgtacttagaccacttagcacatacaataagtgctcaaataggagattttgcttaacgaaagcaactgaaagtgaactcttcagcagtgtccaagaaagcgaacactctcagggaccaccaagaaagtagaaggggcatttttgtacaactgcacaatgggagcaaccttgaaccctacctcacttataactttcccttacactagacaaatagagaacggctgtttattgtcagatttgcattttgttagctctgaatatatggagattgtgaaatgaggtatttgagctaaaaattccccagagaattggtttttcaaaaattattcagggtcaagttccacaagggttgagtttctattcttcttgtagatataccaacttttaaaagtgaattaagaagtgatcgctatttcagataaaaagcagggtcctcagagaattggatggttcttctaaaacagtgctttttgcctggcacagtggctcacgcttgtaatcccagcactttgggaggccgaagggggtggattgcttgagctcaggaattcaagaccagtctgggcaacatggtaaaacctcatctctaccaaaaatacaaaaacttagctgggcatggtggtgtgtgtctgtggttctagctacttgggaggattgcttaagccttaggggccggggggtgttgcacggagttgcagtcagctgagatggcactgctgtactccagtctgggtgacagagtgagactctgtttcaaacaaaaaaacaaaacaaaacacaaacagtgcttctcaaatattggcagcatcagaaacatctgaagctggctaagttcagattccagagactagttttgtgggtctgggctgggcccgagattgctgctgctggtttgccgactgtactcggaggagtcatccttttatatttatttatttattttgaataaataaataaagcacttactgagtgcttaatgagccaccacgcctagcctgagtagccaccctttgcagaaatgtcctggaccattttaatgattccctttccaagaacccacttaaatagaggtctgctgtacaaagcgagatactcacacagtcactatttcccccacaatgtttacgtctttcggattgctgacttaccttcagaatttaaaagttgtcattgtgtatttcatttcaccagaattgaatacagttattatacccccccaccgaaaaaaaggacttgttgagctcccccagttccaggtctgcttaagctctgtgctcagctctgggggaagccctttcatgagtaagcagtgggtcgtcacgggaagcgaagtggggccagccgaaccaaaggaaatagagcagatccgcaaacccacacccactcccaaagtcagtctactgtcagaaaagctgaagctgctgggcgcggtggctcacacttgtaatcccagcactttgggaggccgaggcgcgcggattacctgaggttgggagtttgcgaccagcttgaccaacagggagaaaccccgtctctactaaaaatacaaaattagctgggtgtggtggcacatgcctgtaattccagctactcaggaggctgaggcaggagaatcgcttgaaccgggaggcggaggttgcagtgagccgagatcgctccattgcaccccagcctgggcatcaagagcgaaactctgtctcaaaaaaaaaaaaaaaaaattagctgagtgtggtggcgggcgcctgtaatcccatctacttgggaggctgaggcaggagaatcacttaaatccgggaagtggaggttgcagtgagtcgagattgcaccactgcactccagcctgagtgacagagcgagactccatatccaaaaaaaaaaaagagaaaaaagaaaacaagaagaaaggctgaagctactgggggtctccaaagcaaaacactcgacgtccaagaccttggggaaccccagccaccagggcctgtgtggggagcaggtaagggtcaccggctggggtcagtaagcattcaagaagcgctcgttgactacatgaatagtaaatgtgacccgaggtgactttttaagggtggtgggagagaggaagcccacagcgctggtgtaagaggtggcaccccttttttggccttctttgcttcttcttttctctgcccactcccaaggccccatcagtgattctagggggcatcccccaggctggggcactggagaccctcactcaccagggacagctttccggacttcactgtacactgtctctgtgtccttctttcctagatctggaaaaaggaccaggcataagttagtagctgcctctgggaacgaggtcagtccactgcagtcataggaaaaggtctgaggctctgcaggcaaggctgtaccccaccactgcaccccaccagaaccaggtccagaagcacccagagaccttgtcatttctgatgttagaagatcctggctgggcaaggtggctcatacctgtaatcccagcactttgggagggtgaggggggcagatcacttgaggtcaggaggttgagaccattctggccaacatggcgaaaccccgtctctactaaaaattcaaaaaattagccgggcatggtggtgcgtgcctgtgatcccagttactcgagagctaagggacgagaatcgcttgaacccaggatgcagaggttgcagtgagccaagattgcgccactgcactccagcctgggcaacacagtgacacaccacctcaaaaaaaaaaaaaagaagaagaagaaggtcttggtctaacgagcgtcactcccagtctgggaataggaggtcagcaggccattgtggagcagggccacatgcaccagaggaaccctggacctgaggggccacggatggagaggcccccagcaagggcctgcagcctccagcttgctggccccactcctcttcccctgccaccgtgacccttgtccagacattctgccaggtccctcaacgcagggttgggctatggcctcccaatcacctgagagcccagaccccgggatccagaacgagatcctgaggtctgggttagagcctgggggttgtcagtgaccctaggaatagctgggactgagaactcttacagggatagacagctgggctggctgttttcactgctggctcctgggcctcactgcagcttctggttggattggtctgggggggtccctggtgctggttttttaggatctcctcaggggccctaatatgcagacagggctgagatcctctgggctagaccctctcaatatggcagcatgatgactgacccagggtgtggcgtatacctggaggagactcaagggcgcccttcctgccatctgtttaccttacactggggtatgggcacaggatgtgtatacaaaaatacacacacagcatatacacacgcacactcatgcacacaatgtgtatacatgctatgtataccctcatacagtgtgtaggatgtgtctacacacattgtatacacactgtatgtacaaacatgcaatctgggtgtgcacacactcatgcacacagggtgtgcacacacatacatacccaccaaccctgaggaaacaggatggaacctggccacttcccagctcctgtcacctgcacaaaggcccaggaagcctcactgtagaaaagagcctgatgtcgtgtgggccactgttctccttttacagatggggaaaggaagccccagatagggtaaggggcttcctgtgccatggtcagtgcatttccctcctcggagtgaatggctggggtgtgaccctggactctacctgcactgagatgcccttgtctcaccatgctccagggacaccccactctcacttcctggccccacacacactcctccacagccagcactgccctttctccttgccccatttccccacgaccctggtggagcttcacgcatgtaccaacacacccacactcactctccctctgtgccctgggaagttacagggccccctgagctccacagcatgttggtgacatttgtccacaacacaccgatgtgacttgttcccaagtccgtctccctggcagaccccgacctcctatggggtgacagctggggtcttggacatgtcccattcctaggcttgctcagctgcctgggggcacctgtccaagtttgaagtgacagtaatggtggtggctcctgtgtcaggaaccatttgtgaggagaaagcctgggggtgggtcagatccctacagttgaacttggggcatttggggtgactagggccttacactgacttccccagggcaccaaacaggatttggaactcagtagagtggctgagctaccagggcaccacactgctgggacagcagagatgcccacacacccctcactctctttctgtggcaccagatgtgggggcctcaaggaaagctgtagggatccccaaccctattgggggatcctccacatccccaagacaccctctgcttgatgtcaggcctggccaaatcactcactcagcagaatcctagacacctagtgtgaaccccgcactgtggaagaggaaaggtgatcgggcctggtcccagctttcaggagctccaggctgcgaggcagacaggtgcacaaacaacgcagacactgcaacaaatgctatcaaacaccatataccaggcgcatggtggggtggtcacggccagctcaccctccgacccaggcccacagtgggggctggggcaggtgaggaataaatggagggagagggcttggtgtttgggcctgggggtttctgcttcttggtggagcttctagagttgcagctgcccccaaatctgcccagttaagtgatgggtgggcaggcagagttgcagctcatcactacctctcctccccacccactccacggcagcagctgcttgctaatgagtaaaccaggctggcaggctctttgtctctgctgtcagggatgtttccggatggggctttattttggcttctgtttttctctgtgttaacagagaaggagatggcttcaacgtcatggggttttcccagcaattagtctcagagcaaacatgcagcaaaccaggatttactgagttccttcctgcccctcctccaccccaagtgaccacttggtcggctgccactagggtcagagctggatgtggttcccaacccctcctccataggaggaggaagtcttgagagcagggaactggcttggtcaagaccaggtcaaatgtactcaccactggccttgtacccacaaagccccttttcgtacctggtaatacctggctctccacccacaggaaggcagagagggaacacctgaggctcaggcctgacttcccacactgctccttagctgccaaggaggaggacgggtctagaaaactcaaattgaattcccaaaaagctctccattgcccccaagtgaccctctttacgggtctacctggacctctgcagcccacacagcttttgtgcaaatggggaaagagggaccagttaggtgatggcatccctgcagctgcacagcttggcaaggagggcacatgctgaccgcctctgcttcacccaatcctggagggtctcgatacctccttatttttaaattttttgtagaaataagttcttgctttgttgcccaggctggtcttgaatgcctgggctcaagtgatcctctcgcctctgcctcccaaagtgctgggattacaatacctccttcttgtcccttcaacccttccccacctttgagcaagaaaaagaaaaccagggccgggcgcagtggctcatgcttgtaatcccagcactttgggaggctgaggtgggcagatcactgaaggttaggtgatccctgaaggttaggagggctttgctgcagtgtgttcctggctgcctctcaggctgtccctccacaagggagggtctgtatgtgcttgtgctgcctgcgtagggccttaatcacaatttgttatctcaacgagtcaatcactctacaatgaaataaagaggaagaggccaggcctggtggttcacacctgtaatcccggcactttgggtggtcaaggcgggtggatcacctgaggtcaggagttggagaccagcctggccaacatggtgaaaccctgtctctactaaaaatacaaaaattagccggggatggtggtgggcgcctgtaaccccagctactcaggaggctgaggcaggagaatagcttgaacccgggaagcagaggaagcagtgtgccgaaactgtgccattgcattccagcctgggcaacaagagcaagactgtcataaaaaaaaaaaaaaaaaaaaaatgaggaagagagcttcaggcctgccgcgttccccacccctctcaggtccagtctagacttggaagtgagttgtgcagattgggcagtacacaacccccgggggccattctgttggtaggctatgggaatgtgccccagtggtgcagcacacagcccagcggctctacggggcatccctgtaaggaaagttctgtgcatacagctgctgacactcagcccaggctcaaaaagagaagacaaggagaagtccaagactcctcccagatcatggagcaaggggtgatttcaggaccccattgccatgtggtctggctagtggctggcacggcctggaaaactgcacgcattcagcctgcacagtcaggaaaactaccccaggcctgcctggctaggtggatgcagcctggggttagcctcagaggaagggagacagatggcaatgatcccagggagcttcccagctgggcaggaaggttctgagactgcttcctttgagcgtgcaggagccactgtttcctttgagcatgcaggagtgtgcagtgacccccggggactgtgtactgcccaatctgggttcgcaaaggaggaggacagttaggagatgcatttttaatttttttttagacggagtcttgctctgccacccaggctggagagcagtggcttgatcctggctcactgcaacctctgcctcccgggttcaagcgattcttctgcctcagcctccccagtagatggattacaggcatgcgccaccacgcccagctaatttttgtatttttagtagagacagggtttcaccatgttggccaggctggtctcgaactcctggcctcaagtgatccacctgccttggcctcccaaagtactaggtttacaagtgtgagccaccgtgcctggccaggagatgcatgttttttatggtgcccaaaacaaacgagattgatgttctagcattttctatggagcagcccactctgcatccatttccccagcatagaaccagagacagggacttccaggccagcctgcccttgagagaaccacatacacaaaaacaaaacccaaggtgtaaaatcagtgccactgctcacacggacagggatcttgtgctttcaaaagcctttacctaagtgtccctctaaatggcaaagcactcgatatcttgaaacatgcatttgattgacacacattcagtctgcacaagcaactttaggaacacactgggtttggcagggggtctacctctggaagggacaaattgctcagtacttcctaattccctggcacttagtaagtgctcaataaatcttacctattattagtagtatcataactaataattatcaaaaatggccaggtgtggtggcttcgcctgtaatcccagcactttgggagacaaaagtgggcagattgcttgagcccgggaatttgagaccagccagggcaacatggcgaaaccctgtctctatttttctttaattaatttttaaaattattgaggccgagtgtggtggctcacacctgtaatcccagcactttgggaggctgaggggggtggatcttttgaagtcagaagttcgagttcacgctggccaacatggtgaaatcccatctctactaaaaatacaaaaaaaaaataaataaattagccggctgtggcggtgcatgcctgtaatcccagctactcgggaggctgaggcaggagaatcgctttaacccggaggcagaggttgcagtgagctgagatctcgcaactgcactccagcctgggcacagagtgagactccgtctcaacaaagaaaaaaaaaatatatatatatatataaaataaaaaatatataaataatataaatataaaaatattatatataaaatatataaaaataaaaaataaaaatatataaaatattataaaatatatattatacacaaagaaaacatatatattatatatgtatttatatttatatattatatatattatatattttatatatatatatatattttttgagatggagtctcactctgtcacccaggctggaatgcagtggcgcaatctcagctcactgccacctctgccttccgggttcaagtgattctcctgcctcagcctcctgagtagctgggattacaggtgtgcgccaccagagccggctaatttttgtatttttagtagagatggggttttatcatgttggtcaggctggtctcgaactcctgatctcaggtgatccacccgccttggcctcccaaagtgctaggattacaggtgtgagccacagtgcctggccttttctttttttcttttaaattattgaaattttacagctcagagacagggccagggccaggggcctttgctccttccagtcttagcaggccggtaggtctgctaatcacttcctttggagcgactgagggtgcacagactcttctcactgaacacagcacccccgccaccactggggtttaaacccaagccaaaggcaatgcctggggactcactcgagtggcacttacctttgtgagactcagctgaggacacttgaacttccgtgtactgcacgtctgagttcagaggctctgctcaaagaaaccacagcagcttgttgtttaggtggaatctcttgtgggcacctcagatcatagaagtagagactttcttttcttttttttttttttttttgagacagagtctcactctttcacccaggctggagtgcagtggtgtgatctcagctcactgcaacctccacctcccgggttcaagtgattctcctgcctaagcctcctgagtagctgggattacaggtgtgcaccaccatgcccagctaatttttgtatttttagtagagacggggttaatttttgtatttttagtagagacagggtttcaccatattggccaggctggttttgaactcctgacctcaagcgatccgcccacctcagcctcccaaagtgctgggattacaggcataagccactgcccccggctagattttcattcaggttattaaagtattctgtattttgagggggcagccagacacaggcttaattccattcgggatgaggaagggagtacgaaccccgcactggtcccagaggcagatacagggcctcggggcccatggtttcctccctgactcctctgttaccaggatgtggagggaccctctggcctaggtccctgtttctacagtggggggacttggaacaggtcagtagagacagaaaacagcccagtatcagccccagcagttctcccaattcagtctcactcaagatgctggaagccttctccacagccacaggcaaacaaagctacctccaagactgagaggatttcgggaaatggggaacaggggtcactaccctaaaaatacttggagagtgtgaggcatacacgtgaatgaaatcactcagggtactaaggtgaaagctagaaaagtagtttgtcttcaagtcaaaaataacattactgttttgtttttaaagccctaaagaatagggattctcatcagctaccaaaacaatgattctgcagtcaaagatacatttcaggctgggtgtggtggctcatgcctgtaatcccagcacttcgggaggctgaggcgggcagatcacctgaggtcaggagttcgagatcagtctggccaacatggtaaaaatccaccaatactaaaaatacaaaaattagctgggcatggtggcacacacctgtaatcccagctacttgggaggctgaggcacgagaatggcttgaacccgagaggcggaggctgcagtgagccaagattgtgccaccgtactccagcttgggtgacagagtaagactctgtatcaaaaaaaaaaaaaaaagagccaggcgcagtggctcgcgcctgtaattctagcattttgggaggccaaggtgggcagataacaaggtcaggagtttgagaccagcctggccaacacagtgaaaccctgtctctagtaaaaatacaaaaattagccgggcgtggtggcaggcgcctgtagtcccagttacttgggaggctgaggcaggagaattgcttgaacccgggaggtggaggttgcagtgagccgagatcgcaccactgcactccagcctggctgacagagcgagactcttgtctcaagaaaaaaacaaaaaaaagaaagaaaggaagagaccttaacagaatcctttctctttgttaggagccttagctcccatggcagcagcccagagcgaaaggaattttgaaaaatgatttagtccaatccctcagtgcttcaggcagaagagagcaatttattgtccattgtctttaaaaatcaccacctcaatgctcaagaaaaaagaggtcccactgccttacccagtagctcattatgagtcaggaagttgttttttgagtataacccagttcttccctactttgatttaggtgactttcccactgaggacactagatagcatctctggtgaaagcagctagctaccttcattgacacatcggctgggtacagggtcattaagagaggtgggaaattatccacagtccttcaagttttagttttcttttcctatgagtcttttttttaatgtaaaagttggttctaataaaaacatgtaattagataattacctttattatcatttattggtttcattgcatggtttctgacatcgtcattgtgacctagttgaaaaataacaattagggtgagtgacaagggaaattctagttttctaaaaccttttaaaaattcagtacccctaacaaagtcaagcctgatttattcagtgtagtgacaaccagcactgtctctgggtcctgggtcccctcgttggccctcctgtgggctccatttgacctgctgtgtagtctttttctttttttctttctttcttttttttttttttttgaggcaatgtcttgctctgtcacccaggctggagtgcagtggtgcgatcccggctcactgcagcctcctcctcccagattccagcgattctcctagtctcgctttgttgcacaggctggtctccaactcctggcctcaagtgatcctcccacctcagcctcccaaagagctgggattataggcatgaactaccatgcctggcctgaatatagtttctttctttctttcttttttgagatggagtttcgctcttgttgctcaggctggagtgcaatgttgagatctcaggtcactgcaacctccacctcccaggttcaagggattctcctgcctcagcctgctgagtagctgggattataaacatgtaccaccatgcccagctaattttttgtatttttagtagaaacagggttacaccatgttggccagggtggttttgaactgctgacctcaagtgatccacctacctcggcctcccaaagtgttgagattacaggcgtgagccaccgcgcccagcctagaatatagtttcttaaacaatatatttgctcgtttctatttactgacacattacttttattactacaaatattttattttccttttttaaagtttatgattcagtactatatgaattactcaattcttaaaacatatttctcaagcaaaatatgtctctgtaaaaagtatatcctaaaaatttcttattttgtgagacatttatagaattagaaaagaacatgagcattctatgaccaaacctgctgataaagcaagaaaagtggctgggctcaggggctcacacctgtaatcccagcactttgggaggccaaggcagaaggatttcttaagcccaggagtctgaaaccagcattggtagagtgccatctctacaaaaaataaaaattagctgggcatggtggcacatgcctgtgatcccagctactcaggaggctgagatgggaggatcacctgagcctgggaggtagaggctgcagtgagctgagattgcaccactgcactccagcctgggaagaccctgtctaaaaaaaaaagaaagaaagaaaagaggaagagtgttccaaatttggtctgggacaggactttttgtgatgtaattatagccccctctgggaagtaagtagcatccctgctgaaatgcttgagcaattttcttactaacctgggattaagaactcctaggactggctactcattcagctgagctgaccctgaagctactgatgagccttatgaatagatatttcttagttggaacactttatttatgcctttactgagagaatattgaaattgcattccctttgtggcaaatttgaagtaaaactgtcttgtgcttgtaataattccatctgagaagatgttttaccaatgttttcattcaatacctggtctctgtcttgaaaatggagaattataatattacgctggagcaatgttcaaagtctttgaaggcattatgattattctccatatttcttctacggggagtttggaaggtggcaaagttagaataaaatatgttacctttccttttacgtttccgtatattacatggcccagtggctgatgagatgaagtaccctgttgaagccagggtttctcttccaactgtaatcccaccacttacatattctgcttctgagagggctaaggaagtatgtagcaagttgggggaaattagaaatggcaggagaacatgactttaccgtaatgactgttagcttccatattgggatctgacattttctcgttgttggagttcagaagtggtactgctggccttaaaatgaaatataaaaacagaaaacaatatatagatatatttgttgttgttattgttctaaccccaaaccaccaaagtaaacaagggaagatcatgagaaaaccaggaagagttttccaaggtaaggaaaactttactctctcatttggaaaacaaatattttttggcagctccaaggattatgtaaaaaaacttttttttttttttagacagagtctcgctctgtcacccaggctggagtgcagcagtgcaatctcggatcactgcagcctccgcctcctgggttcaagcgattctcgtgcctcagcctcccgagtagctgggattacaggcatgcaccaccacgcccggctaatttttgtgtttttagtagagatggggtttcgctggctaggctggtcttgaactcctgacctcaggtgatctgcctgcctcagcctcccaaagtgctgggattacaggtgcgagccaccatgcttggcggtgataaaactttttcctattaaaataaacatcaggaccaaagcacacatgaataccaggagtccttcacaggctactaccaagcccctgaaattcttatcccacgctactgtttctctctggaacagagcaatcatttctatacttttggatttgggatttcaacaacagtaaaggtagtaaaaccattttttaaaggccaactctattttgtcaaattttaaaaaatttatctactaccattataatttcataaagaaagggagatttcacaaataatcatgtaggaaggacatgatctcagaataaaagccattccttcccatgaaaggacaattggcattcttccacggaggtacacacacacacacacacacacacacacacacacaactcacacacacaactcacacccaaggaaggcctatatttttctaagtttgccaagagccactgaaaacttcctaatgaccagaatctccctccagacatgtccaccgtgctcacagagcagccgcccccttcttacaaatacactcacctggacatttccactggcatctgcttggctttaaaacagaaaacgaaaaaccaaagtcagtatacagtacccacatccataccactataatggccaaaacgccaatggcttttgcactaacctaatagatagaaaacacttttcttttctttttgttttactcctagtaagctgtgaaggaacactcttttcagctacgtttgacttcccagaagattgaatacccagaaaaagagagaaaaagaagccaaatatattcactcttttacaaaagacagaaaagaaagaggtattctcttggtcttataccaagatatttccccagaaacatgatatcttgactattttagccagaagtgatttttgttagtgaaatatgatggaaaaagagacaatgatatgggaaccagattagccagataagcaggcagctctcttcctctctctctctttttttttttttttttgagacagagtcttgctctgttgcccaggctggagtgcagtgatgtgatctgggctcactgtaacctctgcctcccaggttcaagtgattctcctgcctcagcctcctgagtagctgcaattacaggcacccatcaccacgtctggccaattttttgtatttttagtagagatgggggtttcaccatgttgtcccggctagtcttgaactcctgacctcaagtgatctgcctgccttggcctcccaaagtgctggaattacaggtgtgagccaccgtgcctgaccactctctttgattccagataattacaaaaagtaaaggcgaaatcaatccctgcgtttgtaactcgaagctggcctaagatcaacgccagggtgtgctctatcttccttgatgggtggcagctttcctgacaaaaaccagggcccctcctcaccccatcttcccctcccatcctgggcagcagcaccagaggctccaaaagaacctaccttatcccacaaaaaaatttttgcaggatttactgatgctctgcccttttccttgagtcttggacagctgactctgattcctggttatcagcaggtggtcctggctgctcagccgggcttacttagctaaccccaagcatagggtagaagtcacagcacaaccaccaggttaattacaaagcattcaatgtgtgtgtgcaacatgtgggtgttatgcgcatgtttgtgtgtctccaagacacttgcaccccactctacacgcattacaggactaggtgtggacaaatctacagaaatggcttcttctaaccacacaaagatgcaatttccccccaaatttatcttttctggtttgcccaatgaggaaaataatagctttcatttttgcctagctgaatccaggggtcagaaaagcaccacgcatccctggctggtttcctggcaaggacgaccagtcagtatggaaggaaagaactatgctcacccttggctttcctcagaaaataacatttggccgcaatgatcaagagagcaatgatcactccgatgataaccactgcaataagtcctttcttccatggggcaagaatgactgaaaacaaaacaaaacaaaaaattttttttgtatataggctcttcctctgccaggaagaaataatatcaggcttaagcaacaaaagtcagtctgattctcacagctcttgtaactggcagcttgccttagcatccatctacctctgaggggttctgcactcagagctggtgcagaaatgattgtttctgctacaaatagaggtcagctgtggtcctcaaggagggaacaaaccagctttgctggggtagactcttttctttttctttcttttttgaaacagggtctcactctgtcacccaggctagaggctgatgacagctcactgcagcctcaacttcctgggcttgagcaatccttccacctcagcctcccgagtagctgggactacaggagcacaccaccacacacagctattttttgttggtttgatttttgaggcagagtcttgctctgttgcccaggctggagtgcagtggagcaagctctgctcactgcaacctctacctcctgggttcaagtgattctcatgtctcagcctcccgagtagctgggattacaggtatgagccactgcgcccagcctatttttgtactttttgtagagacagggtttcaccatgttgcccaggctggtctccaactccagggctcaagtggagtagactcctttttggcatgtgttttcagccctcttcctctccaggaaaccgcccccacccacataagtgggttccccaatcatgtctgttctgcgtgacccaatccccttggctacaggtggtctgtggttggatgtttgacccaagatgactcaatggtgagtctgccaacaatttgtaattggaacgatgtgacattctcccaattccttataataatcgatttctcttttttacttaatttgagtgggtttctgtcacttgcaaccaagagcctggaggacattactctcctagccttcagtcacataagctagactcccccccaactccctcttacaaggggtgtgttttctggtcttgcccttgggagcccacagcacagcttgctatggagaccctgactcacctctgactgtcagtattttgcttctggggacactggaggcgtggttggctctgttgaaggctgtgcagtaatactctccctcctgttccttgctagccttctgcttggtccaaaatgcctgggtggcatttgaggtcatttgatagaagggtttgccctctttttctctgtaaaacttataggtgatgggaccagatccttcattcacagcacattgcagcacaatgtcctctccagactccaccaccttacttgacaggatagaaatctggacctcatccaccggggctgaaaagcaggaaaaggattcacactgagcaaagaagggcagaggaagaggaacatgagacagccactgctcaacttttttttttttcctctgagacagagtcccgctcttatcacccaggctggagtgcagtggtataatctcagcttactgcaacgtgtgcctcctgggttcaagcaaatcttcctgcctcagcctcccgagtagctggaatgacaggtgcgcccaccaggcccagctaactttttggatttttttgttgttgttgttgttttagagacggggttttgccctgttggccaggctggtcttgaattcctgacctcaggtgatttgcccacctcggccttccaaaatgctgggattacaggcataagccaccatgccaggccacagacaatcttgacccactgccttctctagctatcggccattttttctcctttttcctttatgctttgactcccttatttcacactttcttgttacccctgaaatctgactgcactcttttgtagtcacaatcttgtgacactgcactctctctcaagttttgaagaaactgggaaggtcacttgattccccaaccaacgtccctgagtcccctgctgattaaattcagtggtggatgctcttcctccacgctcccaatcttgggctctccatacttcactgttgcccaggtcttactgtggaactcagctttttctgggcttctgggcttcctcatgactctgattctcttcccttcttacctggcacccctttcttattcactggttattctttgttttccccggaagtatgaacattttgcaaaattcaatcctcagttttccatccccattctcctcctgggtgatttcacctacacgctgagcttctgtctctgagccactgacacctaaacctatggctccagtccaggttactttcctgaactccaagtctcccttttcacctgggcatttccacctggaagcccagccagcctcactccctgcaggtccaagcagaacttggctacctcctgtatccgcttttcctagctccatcctcaactaccaaaattcggatcctaaattgtcttcccaagtagactttccttctagtgtgagagcagatggtcagcagatggtattgtaacttatgagtcactctcctgtgagtgcaggctgtggtaagacaatggaagaagccaagctccgggcctgggacaccagtgggctcaaatcccagtcccaccacccaccagctgtctgccctaagcctcagttacgtcatgataaaataacgacaatgctgttactggccttctgtggttattgtgagtttccattggagcaatttactacagtacttcacacagggctggacacatggtcagtaaatgtgagctactgatatcgacccagtttaaaccaacagcttcacatgggcttcacattagcctctaacgtaccatgaggtctgaagtcaccatgcctgctccctgacccagccaccaggtggatcgttccgagaactcatttgcatcctgtccttccttccatcttctggcttttcactgcatgcaggacaattgcctactcctgatactggcacctgacacctgtcacgcttaggctcagccactttttcagctcatatccggtgattctccattcccaaactccagcctttgtttccagccatctgatttggccacagtctttttttttttttttttttttttttgagatagagtctcactctgtcacccaggctggagtgcagtggcacgatcttggctcactgcaacctctgcctcctggattcaagtgattctcccacctcagccacctgagtagctggggctacaggcacccaccaccacgctgggctaatttttgtatttttagtagagacggggttttgccatgttggccaagctagtctcaaactcctgggctcaagtgatccaccccattcggtctcccaaagtgctgggattataggcgtgagccaccgcacctggctgcgcacagtcttttgaagtgccccatgggaccttttggctcatgtgtttgctggagatgttcagccatcttcagccttctctgcccacccattctcaagccctggcacctagcccagctttttcacaatgtttacccacttaagctagatgaagtctgacataccctaaattactatcaccatcactgtaaggatatagttcacgtgacaaccaaacatgacccctaacattttttctatgcttattggtattatgattcagatgtttctccatcatttaattaggagagcttgtgtttcttaccacagcattgaaacaaagaatatgtcttcttttttgtatgcctcacaccattaggtgcttagtctatgttaatgttaattttttttttttttgagatggagtcttgctccgttgcccaggctggagtgtagcggaatgatattggctcactgcagcctctgcctcccaggttcaaatgattcttgtgcctcagcctcccgagtagctggcattaaaggtgcccaccaccacacccagctaattttttgtatttttattagagacaggatttcaccatgttggccaggctggtctcgaattcctgacctcaggtgatccgcccacctcagcttcccaaagcgctaggattacaggtgtgagctacctcaaccagcctatgttaatgttaattgaaaaggtatggctactattagactatacatgaatagaagcaggaatccctctctcctattcacatccaccagcagcccatgtagataggcagttactaaacaagaaggacaaagaggaggaagccttattaaactttttacaacaggatgcaaaatatctaagacatgcaagcaatggcactcctgaggccttctgagaggcatgagatagaggcttaagggaaactgtccacccccaagacaatggtatatttctcttgagtatgatgagaatcccaggcaaatgttagtaactgccatgagaccacagcctgtagctctcactgctgcagaattcacacaaggcagggttgcccggctaggagtcacaacagcagagtcctgatctacaattctcagaacagtgtatctgaaaaggagaaagtgctaagggagcccatatgcacaacttcagtgcttcctgcagtcaggacactttcatgcttatcatattttagcagtttgttgaaaggttctggaaagagattacattgtcctcatcaatagcccccaaatattttccagcctcctttactgaaccttggccctgctttggtgcatatctagtatatggactttgcataagcacccactacttctctcgctttttttttttttagatggagtttcgctcttgttgctcaggctggagtgcaatggcgcaacttggctcagtgcaacctctgcttcctgggttcaagcaattctcctgcctcagcctcccgagtggctgggattataggcgcacgccaccatgcccagctaatttttgtatttttagtagagatggggtttcaccatgttggccaggctggtcttgaactcctggcctcaatgattcaccggccttggcctcctaaagtgctgggattacaggcatgagccaccgcacctggccccctacttctcttattgttcccacagtccctgggcgtgaaagaatgccccaagcccacatgatttcttctcacagcacagcaacttacctatcaccttcaccctcagaacctcacttaacattttggcatgggaatggcaattatctgcaacacactggtattcgacgtcttcagtggggttgtctttgaataccgcaggatcatttgagttcttggtactattctccaaaactttacttgtttttaaaagttggtaagaaataggcaaagttccactgatcgattcgcaacggacttcgatggtctgtccttttatgacctcaaactgggcatcataagaaatcctgggctgggagagcatttctagaacagagggagaaacaatccaaaaggcactgaaggtaaaagcaaagcatccagcacaagaggttcctcctccaaagcctgagctttgctttctatccctgctgtaatttcaaatgcctgcctgccttatttacctttataggacacctatgagactgacaggctgtgtgtgtgtgtgtgtgtgtgtgtgtgtgtgtgtggtgagaagggaaagggaaagagaagtacaataagcaaaacagagaatgacagaaattcaaggaaaacattacatccccagaaatacatgttcatattttaccatatctcacacgcacatgcacacataatatacttttcttgtgttgagcaaagacacagaaaacatagaaaaagtacaacaagtagccaacaaaatgtgtgtgtgtgtgtgtgtgtgtgtgtgtgtatttgagacagggtctcactctattacccaggctggagtgcactggtgcgatgacagctcactacaacctcccagaatcaagcaatcctcctacctcagcctcccgagtagctgggactataggtgcacaccacacctggctaattctttattttttgtagagacagggtctcactatgtgctcaggctggtcttgaactcctggactcaagtgatcctcccacatcagctgcccaaagtgctgggattataagtatgagccaccacacctggctgagcatatatgtgtgtgtgtgtgtgtgtgtgtgtgtgtgttctgagaccgagtcttgctctgtcacccaggctggagtgcaatggcgcaatctcagctgaccacaacctccacctcctgggtccaagggattctcctgcctcagcctcccgagtagctgggattacaggcatgtgccaccacacccggctaacttttgtatttttagtagagagggggtttcaccatgttggccaggctggcctcaaactcctgacctcaggtgatccacccaccttggcctgccaaattgttgggattacaggtgtgagccaccaggtccagccaatatatatgtttttaaattattctcagccagtcacggtggctcatgcctgtaatcccagcactttgggaggccgaggtgggcagatcacctgaggtcaggactttaagaccagcctgaccaatgtagagaaaccccgtctctactgaaaatacaaaattagctgggcaaggtggcacatgcctgtaatcctagctactcgggaggctgaggcaggagaatcgcttgaacccgggaggcagaggttgcagtgagccgagatcatgtcattgcactccagcctgggtaacaagagcaaaactccatctcaaaaaaaaaaaaaaaaaaaaaagataaaaaaagtcttcttagtgcttcagcctcttaacagataagaattatattaggtcattatttaggcattagtttatttaaaccttatacaatgagatttcctcctcccaagaacaaaaaataaaataaaacgttataacacacatttgtctcttgcattcctgccttttgagttaggtggttagagcattaaaaataggctaaaatcctggttcagttgaagctataataaaatcttagctggataaaacacagccacaggttaaatgaaaggatcgtgactgaataatatagtgacagtgacaacttgactggagttctataatcaaccagaatctcgccacccaaagtgtggtccagagaccaacagcatccacatcaccaaaatgctagttagagatgcagaacctggccccatctgggcctaaaatactgaatcataacctgtattttaaccaggtcttgcatgcacattcaggcctgagaagcccagctcctggtggtcaaatacctacattctgtccactggaagtcttacccttttgggttagccaggatacagatttaaaaaatggaattttgatattcttggccgggtgtggtggctcaggcctgtaatcccaggactttgggaggctgaggcaggcagatcacgaggtcaggagatggagaccatcctggctaacacggtgaaaccccatctctactaaaaatacaaaaaaatattatccgggcgtggttgcgggtgcctgtagtcccagctacttgggaggctgaggcaggagaatggcgtgaacccaggaggcggagcttgcagtgagcccagattgtgccactgcactccagcctgggtgacagagcgagactgcatctcaaaaaaataaataaataaataaataaaagtaataaaaataaaaatacaaaaattaggcagacatggtggtgggcacctgtaatcccagctacttgggaggctgaggcaggagatcacttgaacctaggaggcagaggttgcagtgagctatcgtgccactgcactctagcctgggcgacacgtctcaaaaaaaaaaaaaagaaaagtttaacattgactaagtagtgtttccttcctgaacttttgggtgggtacttgctccaggaggcagaatcttgccagaatcttagcaagtcagaggccacatcatcatcagtgaatcagtgttctgagcaggaatacctccttgtttctttggcctttgatttcgcacttctctccctctagttcttaccctgcctgagtctgctcagaccggagagggcggcagctgcagataaatttcctttctcccattcaaccctggatgtcctctgagtcagcaacaatatactcaccacatacgactatctggactgtgttgcttttcttgaccactttgtcaatacctgcagtgcagatatacgtcccactgtccgactttgaggctatcttggtgaaatcttgagtctgtgacacaatcgtatcttccttctggatggtgaagttggctggaggtgctcctgggatggagcaggacaggttcagtctttcaccttggtccagatgtgtgaaggaagattccagttcgggcttggaaaatagttctgaaaaacagtgagtgggaatggagcgagatgtgtctggccaccaccctaaagacccttcctggagaggcccttggctcaggtgctcttggcagaaccaacttccaacttccagcaaaaagttttcctttgcttctcatgtacctaacgatcaccccagtaaggagctagggttcattctttgcctaggattccaatggcaggttttcctttcttgttaatccaatttatttcaatgacaaggattagaaaagttttgcaacttgtggccaggtgtggtggctcatgcctgtaatcccagcactttgggaggcagaggtgggtggatcacctgaggtcaggagttgagaccagcctgggcaacatggtgaaaccccatctctactaaaaatataaaattagccagcatggtggtgggcgcctgtaatcccagatacttgggaggctgaggcaagagaatcccttgaacccaggagacagagattgcagtgagccgagattgctccactgcactccagcctgggcaacaagaatgaaactccttaagctagcagaaggcaagaaataactaaaatcagagcagaactgaaggaaatagagacacaaaaaacccttcaaaaaattaatgaatccaggagctggttttttgaaaggatcaacaaaattgatagaccgctagcaagcctaataaagaaaaaaagagagaagaatcaaatacacgcaataaaaaatgataaaggggatatcatcaccgatcccacagaaatacaaactaccatcagagaatactacaaacacctctaagcaaataaactagaaaatctaggagaaatggataaattcctcaacacacacactctcccaagactaaaccaggaagaagttgaatctctgaatagaccaataacgggatctgaaattgtggcaataatcaatagcttaccaaccaaaaagagtccaggaccagatggattcacagccgaattctaccagaggtacaaggaggaactggtaccattccttctgaaactattccagtcaatagaaaaagagggaatcctccctcaggatgatgaggccagcatcatcctgataccaaagccgggcagagatacaaccaaaaaagagaattttagaccaatatccttgatgaacattgatgcaaaaatcctcaataaaatactggcaaaccaaatccagcagcacatcaaaaagcttatccaccatgatcaagtgggcttcatccctgggatgcaaggctggttcaatatacacaaatcaataaatgtaatccagcatataaacagaaccaaagacaaaaaccacatgattatctcaatagacgcagaaaaggcctttgacaaaattcaacaacccttcatgataaaaactctcaataaattaggtattgatgggacgtatctcaaaataataagagctatctatgacaaacccacagccaatatcatactgaatgggcaaaaactggaagcattccctttgaaaactggcacaagacagggatgccttctctcaccactcctattcaacatagtgttggaagttctggccagggcaattaggcaggagaaggaaataaagggtattcaattaggaaaagaggaagtcaaattgtccctgtttgcagatgacatgattggatatctagaaaaccccattgtctcagcccaaaatctccttaagctgataagcaacttcagcaaagtctcaggatacaaaatcaatgtacaaaaatcacaagcattcttatacaccaataacagacaaacagagagccaaatcatgagtgaactcccattcacaattgcttcaaagagaataaaacacctaggaatccaacttacaagggacatgaaggacctcttcaaggaaaactacaaaccactgctcaatgaaataaaagaggatacaaacaaatggaagaacattccatggtcatgggtaggaagaatcaatatcgtgaaaatggccatactgcccaaggtaatttatagattcaatgccatccccatcaagctaccaatgactttcttcacagaattggaaaaaactactttaaagttcatatggaaccaaaaaagagcccgcatcaccaagtcaatcctaagccaaaagaacaaagctggagacatcacgcaacctgacttcaaactatactacaaggctacagtaaccaaaacagcatggtactggtaccaaaacagagatatagatcaatggaacggaacagagccctcaggaataacgccgcatatcaacaactatctgatctttgacaaacctgagaaaaacaagcaatggggaaaggattccctatttaataaatggtgctgggaaaactggctagccacatgtagaaagctgaaactggatcccttccttacaccttatacaaaaattaattcaagatggattaaagacttaaacattagacctaaaaccataaaaaccctagaagaaaacctaggcattaccattcaggacataggcatgggcaaggacttcatgtctaaaacaccaaaagcaatggcaacaaaagccaaaattgacaaatgggctctaattaaactaaagagtttctgcacagcaaaagaaactaccatcagagtgaacaggcaacctacaaaatgggagaaaatttttgcaacctactcatctgacaaagggctaatatccagaatctacaatgaactcaaacaaatttacaagaaaaaaacaaacaaccccatcaaaaagtgggcgaaggacatgaacagacacttctcaaaagaagacatttatacagccaaaaaacacatgaaaaaatgctcaccatcactggccatcagagaaatgcaaatcaaaaccgctatgagataccatctcacaccagttagaatggcgatcattaaaaagtcaggaaacaacaggtgctggagaggatgtggagaaacaggaacacttttacactgttggtgggactgtaaactagttcaaccattgtggaagtcagtgtggcgattcctcagggatctagaactagaaataccatttgacccagccatcccattactgggtatatacccaaaggactataaatcatgctgctataaagacacatgcacacgtatgtttattgtggcactattcacaatagcaaagacttggaaccaatccaaatgtccaacaatgatagaccagattaagaaaatgtggcacatatacaccatggaatactatgcagccataaaaaacgatgagttcatgtcctttgtagggacatggatgaaattggaaatcatcattctcagtaaactatagcaaggacaaaaaaccaaacaccgcatcttctcactcataggtgggaattgaacaatgagaacacatggacacaggaaggggaacatcacactctggggactgtagtggggtggggggaggggggagggatagcattaggagatatacctaatgctaaatgacgagttaatgggtgcggtacaccagcatggcacatgtatacatatgtaactaacctgcacattgtgcacatgtaccctaaaacttaaagtataataataataaaaaaagagactgaaactccatttcaaaaaaaaaaaaaaagcaacaaaagaaaagttttgcagcttgtaatgcagcaaataatgattcatgcattcactcatgtatttgttcactcactcatttcaccccacaagtatttattgcaggttctctctgtggcgggccccttgctaggcactgagagatagcagtgaataagaaacagtctctgacttcaaagtgcttacatttagtggttgattcagatgcattatttgtcacagaccccataggaaaaacactgaactggcagggcgtggtggctcacacctgtaatcccagcattttgggaggccgaggtggacggatcacaatgtcaggagttcaagacaagcccggccaacatggcgaaaccccgtctctactaaaaatacaaaaattatctaggtgtggtggtgcatgcctataatcccagctactcgggaggctgaggcaggagaatcgcttgaacccgggaggcggaggttgcagtgagctgagatagtgccacttcactgcagcctgggcaacaagagcaaaactccatctcaaaaaaaaaaaaaaaaagaaaagaaaaaagacactgaacctagccttgggaatcatggaaaggcctgttggagaaagttatccagggaaagtatctgagacagaatgtctcagtccatctgggcttctaccacaaaatgctgtagactggtctagttatgtctatgaattcttcataggtaaaaccgggtcttaggtagctctttatccccagtaagttgcccagcatacagaaaatgctcaatatgtgttgaactggtacttttctttaatgagataatataaattgtatcagtaaaaaaataccatgagccatcaaaatataagtcatgatcaatacttaactaaattgctagcacacactatagaccagcaggacccaatgtatatgccaatataccagttgggtagttggtagcctacctatggtgctggagactgttgctgacactgcacactcaatgcttgacacataggaggcttttagtaaataactgaacaaatgaatgaatgaacgttatgaatgcagacacatgagaaccccttcaccgtgcaaccaagaagtgctgactgtctctgtcccctgaaacattgtcatctaacactcattccttcatccaacaaatatgtattgaattcctcctgtgtgccgggcactgttctaggtgttaaggatatagcactgaacaaaataatgttcctgttctcagcggcttgcattctagtggctgcatacacataataaacaagaaaggtagagtatatttttggtgctaagtactttagagggaaataaagccaggtaaggagggttaggagtctgagggaactttcaagttcatggatttgaaagccaaacaggcctgagggtgactcttgttctacccccttggtaaccctgtaatccttcgttgagttactaacctcacagtctcagtttccacatccataaagtggacattcttatgcctatctccttgaattgttatgagcatgaaatgaaaatatatataaacctgggccagcccagtggctcatgcctataatcccagcactttaggaggccgaggcaggcagatcacttgaggttaggagtttgagaccagcctggacagcatggtgaaaccccatctctactaaaaatacaaaaagttagcagggcatggtggcgcatgcacctgtaatcccagctactcgggaggctgaggcaggagaattacttgaacctgggaggcagaggttgtagtgggccgagatcgtgccactgcactccagcctgggcaacagagtgagactttgtctcaaaaaagaaaaaaaaaaaaagaaaagaaaatgtatataaacccatcatgcaatgttcaacaaagggtaattgtcatttctttttttttttttttttttttttgagacagagtctcactctgtggcccaggctggagtgcagtggcgcaatctcagctcaccgcagcctctgcctcccgggttcaagagattcttgtgcctcagcctcccgagtaggtgagattacaggcatgctgccatgcccagctaattttcgtatttttagtagagatggggttttatcatattggccaggctggtctcgaactcccggcctcaagtgatctgcccaccttggcctcccaagtcctgggattacagacgtgagccaccatgcccagccatgttatcattatttttgagtttactaatgctttctcatttgtggccctgtcataggacccacgtctgggatctagcatagtgcttgtcacaggggatggagaaatataacagagtaatgaaaacattaaccagtgttcagagtcttactctgtacaaatctctcagctcatgcttacagtatagttatctcattaatcattatagcagtcctaaaaggtcattatcaccatctcacagcgctgcggcacgttcaataactcacccaaggtcacagaagcagtgagcggcagggttgagctttggtgccggagcctgtaccctcaacacgcacagtagactgttaactcgctctgcagtggtttcttcccacgagcaccaaagccccatctgagcacattcattcagataagcaggggcaggaaatgtatcagctctctttggccatgctggattgcagcatggtggcctcttgagcccgccatatgccaacaccctcccgcagcagcagccctacctgttatgttgaccacgatgctgctgaccttggatatgcggctggactccactttgcacgtgtagttgccactgtgctccaccatggccatgactgagtacacagccttgttgccatgtctgttgtgggccacaatcgccttgtccttctgaattatgatttctggaaactcctgggccaggtgagtcacttgaatggtgcacttaatgtggagctgagctccttccatgatcattccggtggggctgatgtggaacttgggtgtagagaaggattctgcaagagaggaagacaacctggttggactcaggtgcaaacctgggcaagaggagcctcttctgctctttttgctgcttccccttttcaaacttctattgttcctaactaactttaaaaattcaacctttcttctctagaacttttgccttggctgctctcatactccctcccttctcgctcactcttgcatcttcaggcttcttcactgcaattctctgggtttctgaagcttcccaaaggccaaacaccttctctagatctcgccttcagaggacttcagaaataaccacagtatttagaaatgatcttcctcctgcccactacgagttttctaggctattctcagcacttcatggaagcttggcatttcagcatgaagatactatagctttcaaaagttcagctctgtgaaacgtgctgcttcatggaaatgaatatttaaataatcgcatgcctccaaaaaagtggcttctagtcttttctatttcattttttaaaatgctggccatcactcactaaactgatttcatgactcatgcagtttgaaaaacaattttgcctgagtgtggggccttacacctgtaatcctaacacttaggaagcccaggagttctagaacagcctctgggcaacatagtgagaccctatctctatttaaaaagaaaaatagttttaatcaagtatagatcacataccaaccagggcataggatcttcagggaagtagggataggtcctaggctttcgtttccacttacaacaaaaaaacaagcccagggcataaactggaatatatacacagattccaactgtgtaaaatatagattagggatatctttaaaatgctaatagtgaacttagagtactctaatgctttaatattcattagtgatttttaacattataaagtcaattcataattagaagttatcataaaataatagcctgccttctcaaataaaagtaaaaaaggggaaggcatcctttacatgctttaggactctcaaattttaggtcttctggggaaccttaataatagctgaagggtgtttttctttcacccaaatcacctccagatgcaccagatatttaaatgcagagggaaaaaaatgaaaccatagcacaggaatagaaaacatgggtgtgtttttttcctttaataatcttgacatgcagaagacctttaagtatgaatcacaaaactgaggcgccataaagaaacagaacaggtaaatttgactaaatgaagattaaaaacttcagcatggaaaacttatcataaaactcaaagaaaaatgacaaactagagaaaatatttgcataatatcactgacaaatagctaatcaatttattaaaggctcagctaggggcggtggctcacgcctgcaactccagcactttgggaggctgaggcaggagaactgcctgagctaaggagtttaagaccagcctgggaaacaatggtgagaccctccatctcaaaaaacatattataaaatattttttaaaataaaataaaggggtcaggcacggtgctccacacctgtaatcccagcactttgagaggccaaggtgggtggatcacgaggtcaggagtttaagaccagcctggccaagatggtgaaaccccgtctctactaaaaatacaaaaattagctgggcgtggtggcagccccctgtaatgccagctactcaggaggctgaggcaggagaatcacttgaacctggtgggcggaggttgcagtgagccgagattgcgccactgcactccagcctgggcgacagagtgagactccatctcaaaaataaataaataaataaaataaagggcttgaacaaatccaaccaggaacaataaaaatgactttagtcaaatttaactatcttgtttctttgtggcactggagttttgtgattcacaatgaaaatgacaaggcatatatgaataggtggtttacgggaaaaaaatgtaatagatgaataaacaaactcaacctcactaaaaactaaagaaatacaaatcaccacaacaatgatatatatcactatacctcaactagattgtcaaaaataataaaacattgaaatactctgttaggaccaggcacagtggctcatgcctgcaatcctagcactttgggaggccgagatgggaggatcacttgaggccaggagttcgagaacagcctggtcaacatagcaagaccctaatctctatttaaaaaagaaagaaagaaagaaaaagtttgttggtaaggatgtgggaaaacaaacactagcatcactactgatgaaaatgttcaaccatcttgaagagcactttggcaatatctagcactttggcaacatcgagccaggcacagtcagccaaaccttttataaattaaaggaattagctgtttgttaaaggtactatgcaaatattttctccagtttgtcatttgtctttttattttacgataagtttttcatactgaagtttttgttgttgttttgagatggagtctcactcagtcacccaggctggaatgcagtgacacggtggctcactgcaacctccaccttccaggttcaagtgatcctcctgcctcagcctccagagtagctgggactacaggtgcccaccaccacgcttggctaatttttgtatttttagtagagatgaggtttcaccatgctggccaggctggtctcaaactcctgatttcaggtgatccgcctgcctcagcctcccaaagtgctgggattacagatgtgagccaccatgcctggcctcatgctgaagtttttaactgaaaatgcacaggccaggtgtggcggctcatgcctgtaatcccagcactttgggaggctgaggcaggtggatcacctgagatcgggagtcaagaccagcctgaccaacatggagaaaccccatctcaactaaaaatacaaaattagccaggcgtggtggcacatgcctaatcccaactactcgggaggctgaggcaggagaatcgcttgaacccgggaggcggaggttgcggtgagctgagattgcgccactgtactcgagcctgggcaacaagagtgaaactctgtctcaaataaataaataaataaataaataaataaataaaaaaaaaagaaaatgcacaaaacatctgattcaacaatttgactactaagaattaaccacataaataataatagtaaaatagttgccaaagtacacaagttacaagtacaaatatctatactgcaggattgttgtaatagcaaacactgagaaaaatacctaaatatccatcagcagaagatgaggtaaatcactcaagcccaggagtttgagggttgcagagatggcccatccctacagtcaagttctgagttctaaaatgagatagatctatatttcttcatatggacaaaagtccataagattttgtctggtttttaaaaagctgtaaaatagtgtgataggtccccatcttttgtaaaaacaaaagatgttttttctgtgtgtgtgtgtgtgtgtgtgtgtgtggctgggtgtgtatatgatatataaatatatgtagaaaaagtctagaggatcatgtgtggttttctctaagtagaggcattataaatgattgtcactttatatacatactttatatcctgctcttttgtctgaaaattctacccagagcacacatgattttataatcagataatagaacatacagacacacatacacacaatgggcaggataaagtgggatgccaaaagaaggggaccatttatgacaaaatgtaagtttcctattttggaaatatttgcaaatatctacatgggtgtgccttcccctgacttctcccggcttggcaaatgagaccgggtcctgggagtggctgactacctgtcctagagccctgtatgtcctggacactccccagcttccctctgctgttgcctccttctctcctgggagcatttcccaggccacctcatttgtttgctgtttgtccaacgcaaatctacgttgaacaacaggaggccaaggctgaggacctggcccctctttcctcccgatcccctccaaacccaacttcctggtgtctgaccctcgatggcttaaagcagtggcttccaaactacagatcacataatgcatcagtgtagtgtgtcatggccagtgtttaaagactgaaataggctgggcacggtggctcacgcctgtaatcctagcactttaggaggccgaggtgagtagatcatctgaggttaggagtttgagaccagcctggccaacatggtaaaaccctgtctatactaaaaatacaaatttagccaggcatggtggcatgcccctgtaatcccagctacccaggaggctgaggcaggagaatcgcttgaacctgggaggcggaggttgcagtgagctgaaatcatgccactgcactccagctcaggcaacagagcaagaccctgtctcaaaaacacacacaaggttggggtggtggctcacgcctgtaatcccagcactatgggaggccaaggcgggtggatcgcctgacatcaggagtttgagaccagcctggccaacatgacgaaaccccatctctactaaagatacaaaaattagtcaggtgtggtgctgcatgcctgtaatcccagctactccagaggctgaggcataagaattgcttgaacccgggaggcagaggctgcactgagccaagattgcaccactgcactccagcttgggcgacagagcgagactctgtctcaaaaaaaaaaccccaaaaaccaagccaaacaaacaaaaagcatcatatatattaagagtaaagtgttgttggtgaaactcttgtctgaaaaattgtatgcaatttaactgtataacagtcaaaaaagcttgaaaaatactggcttaaaatgattaagaacaggtcttaagtcctgagaacagcagccccttcccagttctgggttctttctccccataccaaaccagaaaccacaaagaacgatgaggaagggagcaggatgctgacccgtcacggtgaccagttcactcttggtagattctgaggtctgcatatggatcccagaaatgatcctagcttgacatcggaaggataaaacgcggtcctgttcctcaacggggaattccagtatcacaaaattctggtctcgagaattcttctctcttttcagcttgaccattttttcatttagttcaagtttttcaattgtgaagtgtattggggccttttcctctgggacagaacagttgaccctcacgatcccaccttggatggcctctttcttgtccagtgtcaccctgggactgggcactcctacggggaaagagaaagtctgtcagtatcagcctgattgaagagaaagtctgtcagtatcagcctgattgagagacacaagcctccctccgctgagtgactgtagttgacccatgagagggctcttttttgttctctgaacacccagtgcgacctaccaggtaataaatgaacaggtatgtgcccagcacagtactaggcactttgaaatatataaaatctggaggctgaggtgggtggatctcttgagcccaggagttggagaccagcctgggcaacacggtgaaatgctatctctacaaaaaaaaaaattaaaaattagccaggggtagttagtggtgtgcactggtagtcccagctacttgggaggccgaggtgggagaatcacctgagccgaggaggttgaggcggcagtgagcagtgatcccaccactgcactccagcctgggcaacagagaccctgtctcaaaaaagagaagaaaagaaaggaaaaaatataaaatatgctcaatgggagctaagctatgaggaaacaaaggcataagaatgatacagtggactttggggactcaggggaaagagtgggagggagcgagggataaaagactacacactgggtacagtgtacactgctcgggtgatgggtccaccaaaatcaccactaaggccacgcgaggtggctcacatctgtaatctcaacactttgggaggctgaggcaggtggatcacctgaggtcaggagtttgagaccagcctggccaacatggcgaaaccccatctctattaaaaatacaaaaaattagccgggcatggtggcaggcacctgtaatcccagctacttgggaggctgaggcaggagaattgcttgaaccccgaaggcagaggttgcagtgagctgagatcgtgccactgccctccagcctgggcaacagagtgagactctgtctaaaaataaataaataaataaataaataaataaataaatttaaaaaataaaatatggtcaagatgtacttggtgttttcaatggtttataatcctattgggaagaggacacaatcagattcccaacagatgatgcttagaggggaaaggtagccagtatttgtcagtgtcactgtgattgttgttaccctttattgaatgcagccacaggctaggactgactttaatttattccatgaacattgactgaatgcctactatgagccacattcattgttcaagatataagaataaaccaaacaccatctctgtctttacaatttcactatccagaagagcagacagatgtgtaagaatggatggcaatactgagtgaaatagaatatttgtggaccgggcatggtggctcacacctgtaatcctgacactctgggaggccaaggtgggtaaatcacttgaagttaggagttcgagaccaggctggccaacatggtaaaaccccatccttactaaaaatacaaaaaattagccaggcacagtggcgcgtgcctgtaatcccagttgcttgggaggctgagacaggagaatcgcttgaacccaggagacagaggttgcagtgagccaaggtcgcgccattgctctttagcctgggtgacagaggaagactctgtctcaaaataaataaatacatttctatttattaggaactcactaggtgctggaaattttgctaagcactctacccacatgacacttttaaccctctcaataattgcctgaaatgggtatcgttgttatcttccttttactggtgaggattttgaagtttagagctgttaagggacttgcccagattgaaacccaggcagagtgactgcagaacgaggtgtcttaacacaccgctgtggcctttatacacacaaataccattgaatgtagagagagcatcagagctgtactgactggcaccctggggtagacccattttgttttggaaagagaagacatcattgagttgagtcttgaagaagaaattttaatttatgagacgagatgaagaagcattttgggaggccaaggcaggtggatcacttgaggtcaggagttcgagaccagcctgaccaacacagtgaaaccccatctctactaaaaatacaaaattagccaggtgtggtggcacacacctgtaatcccaattacttgggaggctgaggcaggagaatcgcttgaacctgggaggcagaggttgcagtgagccgagatcacaccactgcactccagactgggtgacagagtgagactccatcaaagaaagaaaggaaggaaggaaggaaggaagggcctggcctattgggaatatgtctagtgcttacgtattcaggtaaggaaaatgccaggcagatgaatgagagggtgatgggtggagagttaagtccagtgtcactattcattcacagctgttattcacgccactgtgtgctatgctccatctgcttgcctgtgctcagttccaaggactcaccttccaccaacacctggtactctgcagtggttttctctttgttgttcacaatcacagtacatttatatgtccctgagtcatagatccggacttcaggaataaaataactctctgtgctcttcatggaggagatgttgtaaaacagcacgtcatccttatagaacagcatctggtgctgaggcttgacgtgagaggtggtgctgacatccgcgaagcactgcagggtcaggttcttcccattttgcaccgtccagtccggcaggctcttcatgtcaacactgttgattgtgaaagctaaatgcaaagggaaggaaggcagacatacctgttatctcagaaacaacatcatcccggtgaccttcaccacatcagatgtggtcttatcccatcctatgcagtattgagtccaggggttctacgtgcctacagggccaggctgatagtaactgtgcacagtggctcaagcaggaggcagttggtactaagctgcaacttttcccaccaaggcaaaggaacagagtgtgataaagatgtagagctaggtatggtggctcacgcctataatcccagcactttgggagaccaaggtgggtggatcacctgaggtcagcagttagagactggcctggccaacatggtgaaaccccctctctactaaaaatacaaaaattagccaggtttggtggtgcaggcctgtaatcccagctacttgagaggctgaggcacaagaatcacttgaacctgggaggcgggggttgcagtgaggtgagatctcaccactgcactccagcctgggcgacagagtgagactgtctcaaaagacaaaaaaaaaaaaagatataggcattctgtgagctgccacatcttggcccctggagggagtacaggattcaagcagtcaagtgttcaagtcctggctcatcatttactgtgtgaccctgggcagctagactctctgagctcagtttccttacctgtaggatggagtaatcatatctcattaggtctttgcaggaaatgtacaggagaacagccagaacgtctcctgtacagtgcccgatatacattaagtgcttaataaatgactgctacctccattccgaaaccagatggtcgtgcccaggccctccttctccacccaggccttaccgaattagcacagtcccagctggcattttctatctgatgggctctgaggtttcaccagatggtgaggacttgaaaccagtttttagcctgctacttgcgttttcagcctcacctgctaccaagaagcaaagactacagattcccctctgccaacggcaggaatctctggtcaagcctcaaaacagccacaatgctcaatcagctatccaatctctgctaggaactaggctgtgggtcaactggccaattgtgtcatttctggcaagtccccagaacagaattggcttatatccagtaaccataggctgtcaatagaattcagctaactacagatcacatattgaggctcattcacagtagcaggctgacggaagggtggattgcttaaaattgggtgctctctagctattgctgtgtttttgtcagttggttggttgtgggcaactgccctgaaaattttccaggctagaagatcctgaaccatgcccatgggtcaggacttgtatccaaacttcagagcagaccagggtgaactgctttttggagatcctcttggcaatgcctgtaggtgcttctgcagcccacttgtggtcttagttttaccccttgacatatctcaaagcactcactagcttccctgtggttgtcttttccaagcacatgaatctgggtttaatcagcaccataaaatattcactctccaaattcctgtcagaaaacaacttcaaacatctcatgttctatacatggctaaaaaaaatatggatgaagctaggtgcagtggctcacacctgtaatcccagaattttgggaggccgaggcaggaggatcgcttgagcccagaagttcgagaccagcctgggcaacatggcaaaaccctgactctacaaaaatacaaaagaatcagctgggcatgatggcatgtgtctgtagtcccagctactcaggaggctgaggtgggaggatcacctgagcctgggaggtcgaggctgaagtgagccatgatcatgccagtgcactccagcctaggtgacagagtgagatcctgtctcaaaaaaaaaaaaaagaaagaaaagaggccaggcgcagtggctcacggctgtaatcccagcactttgagaggccaaggtgggtgaatcacctgaggtcaggagtttaagaccagcctgaccaacatggtgaaaccctgtctctactaaaaatacaaaattagccgggtgtggtacatgcctgtaatcccagctacttagtaggctgaggcaggagaatcgcttgagcccgggatgcagaggttgcagtgagctgagatcgcgccattgcactccagcctgggcaacaagagcgaaactccatctaaaaaaaattaaataagtataaaaaagagaaaaagtaattgatctgtaggggatttggaaaaaaatgtactgaaagtccatgaccataaaaccaggtgtttttcccaaatccctacacgtccccccagaaatttctaccatgcccattctcaaggaagctacctatccagcatttggacctgggattgaaagtgactatgtctggtatgctttcttagccccccatctatctccatgaagtatgaataatgcaatcatggaattttttaaaatttttgagtgaatggagcagtccaatgtttaaaactctcaaagacagatgacatgatatgtaaaaacctcaaagagtctgcagacaaattattagaaataaatgtgagtttagaaaggtggctggataaggccaggaatggcagctcacacctgtaatcccagcactgtgggaggccaggagttcgagatcagcctggctaacatggtgaaaccccgtctctaccaaaaatacaaaaattagccaggcattgtggcatgcacctgtaatcccagctacttgggaggctgaggcaggggaatcacttgaacctgggaggcacaggttgcagtaagttgagatcacaacactgcactgggcgacagaataagactctgtctgcaaaaacacaaacaaacaaacgaaaaagaaaggtggctggatataagattaatattttacaagtcagcatagtggtcatctctggagggaggggctatggggtagggagaagcacagatgcaagctattaaatggtcttttgggatgttggtctgggatgttgatgagatattgtccctaatttcacaaagtgttccaacagcaccaggaaacactgtgtttatgctgaacaactgattcatttctatcttgtggattctgagaatgttctaatggaccttgttcctctttttgctttgattgttaacacacagcaaaaatttcacctctgcttctagcaatctttgggatgcgtttgtgctaaatgggccatagctttatttccctgcctttatttttctctcatcctgatttcctcattaattgtatctcattgaacaatacataatttttataagtggtcccaagtcatttttttggaataagaaaaaagttagttagctagctggccagagatactggcagaacctgtcctttccctctcttttaacaaagttaggcctttgttgggtaatttaaaatttaatcttcaattttaaaacgagtactacaatttgcgcctgctgctatattctgagcaattaatttaacaacaacaacgacaacaaaaatggtgtctgaccagtccatgagatgaaacaaggtgacggtttaaattcaagtcatttcccacagcattactctttggaactcccttttttgtctttatatgcaacttacaagctcctgatttaagaagcctgctggatgagctctcgacacacaactttctttggaccagccgggcacggtggtttatgcctgtaatcccagcactttgggaggccgaggcgggtggatcacttgaggtcaggagttcaagaccagcctggccaacatggtgaaacctcatctctactaaaaatacaaaattagccgggtgtggtggtgggcgcctgtaatcccagctacttgggagactgaggcaggagaactgcttgaacctgggaggcagaggttgcagtgagccaaggtcatgccattgcactccagcctgggaaataagagcaaaactccatctcaaaaaaacctttttttcctttggaccatattaatttctctgcactcctcaattaatatagttccctcccaaccactctcttccctctcagagacagttaggtctccttccattacctcttcagtacttcctccttcattttaagctatgctgtgtattccagtgactcaaccaggagatactaaagagcagaaatcaagtgcacggagccagacctgggccaaatctcatctctgctactaacaaagctgtgtgacctttggcaagtccctaaatttctctgagcctcagtttgcttatccatacaataggcacaaggaatgtaagtataaatgagaacctgagtttaattacttaaagtagagttcctggcacctataaagtgcttgagaaatgttagctagattcttccagttacagaaataaagtcgactctttttttattttttaattttaattttttagagatggggtcttactatgttgtccaggctattcttaaacgcctggcctcaagcaatcatcccgcctcagcctccccaagtgctgggattacaggcatgagctgaaaatcaactattcagagctttaaagctgtgtctccactacatgtttctagggatttttttttttttcaaataaaaaccatatttaaggctgggcgtggtggctcatgcctgtaatcccagaactttgggaggctgagctgggcagatcacttgaggtcaggagttcgagaccagcctcctggctaacatggtgaaaccccatctctattaaagatacaaaaactagccaggcgtggtggcagttgcctgtaatcccatctactcgggaggctgaggcagaagaatcacttgaacctgggaggtggatattgcagtgagccgagattgcaccactgcactccagcctgggcaacaaagatagactccatctcaaaaaaaataaacaaaataaaaagcatattaaacattttcaggttaatttaaagcgacttctccagcctcccagttttgctcactccactgcgtgctctccacacgagtcattcatctgctctcctgtttactgaacgagctgcccatccctggctggttatgccctagaccagcagacagtgctgggtacagaagggagtcagacataccagattcaaacccgtgatcccacagtgcttagctgggtgatctcgggagttatttaacctctctgggccaccacgtctctgcctacgaagtaggaacatgaatacctgccttctctggtatctttaacctaaacagtgactgcgccaaagtggctgagggcacagaaggggccgtgtatatattgcccagtgcctggcctctggttgacattctctgccttcttccttagcaccattcatagcaaacatttaagggggtttttctgtgccaagcactgtcccccatactgggggttcagagaacagtgaggctggcagtgtctgcccttggagagctcattctgcactccacaactcttcctactctgggccttccagcctcagcacaacccttgcgtgagcctcccactaaccagtcctagttcatttgatttttataaaagccctccctttttaaaaaacaattttaaagcaaatttggctaatgcaccaagcagtggtttttccagtagggatggtacccactagcatggggcccgtccaccatcttgtttttctaagcaactctaacacacattatctgctcaaataaacaaactcggcagggtgtggcggctcacacctgtaatcccagctctttgggaggcctaggtcggtggatcacctgaggtcaagagttcgagacccgctggccaacatggtgaaacctagcctttactaaaaatacaaaaattagccgggcatggtagcgggcacttgtcatcccagctactcaggaggctgaggcaggagaatcacttgaatccaggaggtagaggttgcagtgagccaagatcacatcattgcactccagcctgagcaatagagcaaaaactccatctcagaaaataaataaattaacaataaacgaactcaatggatgcactggcaggaacaccacattcccatggctagctcgaacagacaagggagaagagagggcaggatggaaaaaagaaaagcattttataaactctgttgagatatgagtctcagctcttcatcttaacacaaatatcatcgacaaaacaacaaaaacagtgacctagtttttaccgccacaaccaccaccacctcccttgctatagaagcccttcaagatgccccccccaatggtccttgccctctgctcatcacacttacacgtggtcacctcccacgttaacattaaccaacaaaatactccatcaggtaataaaagacaatgcagcttttatcctgatcactctctctcctgtctgggatccctcattctggggaatgccagcagtcatagcataagcagccctgtggaaggtacccaggatgaggaactaaggcctccagcccatagccacaggagtgagcttggaagcagattccccagactcagtcaagccttcagataaccgcaaccctgaccaacaatttatctgcaatctaatgagacccggtgccagcaccacccaactcagccactcctgcattcctgaccctcagaaacttcaggataataaatctgtgttatcttaagccagtaagttttaggtaaattgttatgcagcaataggtaacaaatataccacgcaaccaaacttcaaaagtctctgcctgattcttgttttgataatatggaaaacattatcatctttctaaataaaccagccaagcacagccaaactgaattactgcctgtaggtctcactatttacacagagtgactgttcacaacctgggggacacagcccctgggaggtgcatgggtgggtgttaggaggctcatcaactacctccaattgtgtgcaaatgtgtgctttttctggagagaaggcccacagatttccttactgaacccaaaaagtttcaggactattgtgatgaagggtggggctgtgggacagcctaaagaggtcagatcttttcaacccggggagatgaaggttgacggagaaggatctaaatttggaaagtcaccacggaacagccagtgaccacagtgccaaaccccaacatgctaaaaacagtgggaccttgacctcaaggccactcatcagtggatggtggtgctccctggaaacatgcggcaccatcagtcagccagccccctggccctcaacctggaaatgactcagagagaaagtggagggtgcaggagaaggaggggctgcccaccctcgtcaggaaaattactgggagccacgaagcatagagtccctgatgaacttctgtgctcatcagagagcatgctgagccatcttcctacccgaatctcaagcatctccaagttcagttcaagttcccatccaatgagacatgtgtcgagaacctgtgccaggtgctgggctgacagagtaagtaagaaatcatccttgctgtcccaaacagcaaaggttgctggggcccacatagctggactccagtgatatcagtaagcaccaagaggaagggctgcccaggagaggtcaaggagtctgaaggaagtgaccactgaactgagcctgccaggccaaggacaggcagtggggtactccaggtaagagaacagcgtgtcccaggacacgagggtgtgagaaatccgtgccttctgggcatggcccattacagaaaccagagtgtggggctagagaggccaggtggctgggtctgtcgtgccagaatggagggctggcctgctgtgctgacaagctgggccctgtcctgagggtgtcaggaggggtgtgacagcacccaaggccagtaaacagcttggaagtggttcaggtgaaagctgatgaggcctgagctaggcgggtgcagtggggatgagggaaggataggctggggatctcctgagtggactcaacaggacttgtttctggggtgttgaaaatgttctagaatgaatcccagcacttcgggaggccaagacaggtggatcacttaaggtcaggagtttgagaatagcctggccaacatggcaaaaccttgtctctactaaaaatacaaaaattagccgggcatggtggttcgtgcctgtaattgcagctactcaggagggtgaggcaggagaattgcttgaatctgggaggtgaaggttgcagtgagctgagatccaaccactgcactccagcctgggcaacaagagtgagactctgtcaaaaaaaaaaaaaaaagaaaaagaaagaatatgttctagaattagacaatggtgatggttgcacaacaccgtgaatgtactaaatgtcattaataataaatgttatattatttgtattttaccacaatttaaaaaaagactttgtttgattggatatggggttgaaagaatggaagataaacttcctggattagattcccaggaggatgtgtgtgccaccaaactaaaatagaaaatgccacacgcagctgggtgtggtggctcatatctgttatcccagcactttcggaggccgaggcaggaggatggcttcagcccaggagtttgagaccagcctgggcaacaaaatgagaccccagtctctacaaaaacaaacaaacaaacagaaaaagataaggaaggaagacaaagtgatggtggtgcagctgcgtgtgaggggccagtaggaggactgggaggagacatcaaaggtcagcctgtgttaactggaggctcagggcagaggccagggctggactgtgaaggtgggaggagtgtgaacttaggggaggaggggggaatgtggaggtgttgagaggggagctggtctccagggaggataagaccaggagcccgcagagaccaggacagggttcagactccaggagaagacaaagtaagtccaaagtcagccatgggggagaaggaagagggtttgttagagagtgaggagacaaagcagggaagaggatggaaaaggtcaaggagcgaggctttggggcacgatcaaaagtcaaaggcaggaaaggggtacagggagccgagggctggaagtgtccgttgcatttggcatcaggtggtccttggtgacccctcagcaagaggagacccaacagccggagaagtggggcctgaggccaggctgctgggaggcgaggcgtgtctgagaggtgaggtgggtaggcacagattataaactaactttcagagaggttcgactgagaaaggaaactagaaaggccagatagggggacaccagataaacggtgggggtgggtgtctgcttgtgatttttctttttcctaaaaaaagagttcccattcactgagagaacagagccagaagcagaaatagagattctagaagtggtggtaggggagagggacttgaatgcacgtaggcgtggggtcctgggggtgaggaagggtctcagcctaagtgcctggctggcccccatcagctgaggagcagggtgcatgtgtcctccgaggccgggagggaaaccgagaggatgggtggagaggctgataagcctgcagccaggcccaggcgggaagttgagggagttccctccagatgactgttttctaggtgaagatggagcagccgtcacctcctgaggtgaggcagctgcagtgaggtgcgggctggaggggaacaaagaggcctgagatggaaggaagggaaagggccgaggctgtcccaggaccccagccgcagagcgggagactcagagcaagcctgcaggccacgcactgcaaatgctggcctagggggcctaaggaatggagacctggttccagccgccgccctgcccacccccagtgttgaccctgcttgcttggtgccttgtggcctctgggtctgtttccttgagtgtaaaacaaggcagaggcctgaggaggcagtgggagagtcgctccctgtgccatgtgctgcagttccaacgtcttccctgaaggtacaaagaacattcattctctaggaacccaaaggagggagcaattgacttccatgtggtgtggagggggagaggggagagcaccacggttttgggaaacaggatgttgtgggtaagaaaaagagggaccccaaagcgtgagtgtctgcagggcagggtctggcccaaagggtgtggtctgggagggtacgagggctggagtggacaaagggagagtgggtagggcaggagtcacagtcgtaaaggggggctaggaccgtgtagtaaacaccattgtcatttatcaatcacctcgaggcgggggccaattaatcacctccttttatccagtctcaacctcacacccacttcatgcccacgaagttctcttatcatccccatgttacagattgggaaaacaaatcaaagagcttaagtaaaactggtctaaaagacttgagtcaggcctatggctccagacaaatggtgcagcttcagagagtggaagttccagtcccagtgcccagccaactgcctctctcgtggacaaatcggttctttctttctttctttctttttttctgagacaaagtcctgctccgttgcccaggctggagtgcagtggcgcaatcctggctcaccgaacctctgcctcctgggttcaagcaattctcatgcccctgcctcccgagtagctgggattacaggcatgtgccaccatgtccagctaattttttgtatttttagtagagacggggtttcactgttttggccaggctggttttgaactcctggcttcaagtgattcgaccaccttggcctcccaaagtgctgggattacaggtgtgagccaacgcggctggtaaaatcggttatttctgaggcttggtgacaccatcagtccagcaggataattatgaagattatggatatcctgcctccgtgggttgccatggggatcaaatgcccaaggaagcacctacagttgagcagagaagcctggcagaggggctttgccagtggccaactagccctccccagcctggggccactgctccgaggcttgactcaccagctagccttgcccatggacttcacctccaaagagctgtgcaatttgcctgcaacccagtcacctccattctttgctgattgcagtgacttctgacaaggaaatagtgttctgtgggctctccctctattcacagccccgggacactactgagccccctcattcatgtggtcccagaagaagcagaacaaaaccctctcatctcaagacaaaggttcaaaattagctgtaaagtggaagataaaccaggcttcaaagataggcagcaccccacttccctttgtacaagcacaaaatattacagatatacttgtagcctcacaggtgaatggaaaatgagctccagtgtgtgatttttatcatttaggagtaaaaaaagtagcaacaatttaaactaggatctgtcttcatatgtctaacaaatcaattatatctcatttgcaaataaaaacagttggggataggttacaatattcaaataagccattatggtaaaacaacaaaaaactaattatggaattgctcattaaaataaaaaaatcacctccccatcccaaaaaacagcaatgcactgaaatctagaaaatgtgaggccgggcgcggtggctcacacctgtaatcccagcactttgggaggtggaggccagcggatcacctgaggtcaggagtttgagaccagcctggccaacatggtgaaaccctgtctctactaaaaatacaaaaattagccgggcctggtggcatgcgcctctaattccagctacttaggaggctgagacaggagaatcccttgaacccaggaggcggagtttgcagagagccgggattgcaccactgcactccagcctgggtaacagagactctgtctcaaaaaaaaaaggaaaaaaaaaagaaaatgtgtgctacttataattgtgttttttgccatcttttaaaaaagtaatggcaaaaaccacaattactttgcaacaacctaatatatttttagactagtcaagagtagtcgtgagaacagagaaaagaacatggagtttgatctgtaactgactaaacaattcatcaagataacccactactttcagaccagccaaggaaacgtgtgctacttctaaaacacactgaccagaacttggcttagatctaagcctttctaaaaatgcccacatgggataaactttagttctcaattggattcttttccttaattgttagaagtatcaaaccccagcaatttaatgtgcgttttaggcatcacagaagagaaaggaggaagccaggtagaaacatctgttacagtggaaacatcagacttacagttttcttgaccctcaaggcttgaacctgcaagaaacataagaaacatgttgattccagaagcttcgatgctcatggagttaaagtgatgtggaaacagagtaaacactcacagagcagaagggtcagcaggactccaagccacatcgtggccccttgggcccacctcggctgcatcctgagagtgaagactgcaggcacagttagttctgccttcgggccatgactcgctcagcagaaggcactgcccacaagtcaccgttgagaaacccgccctgtgaaaagcagaaattgctctggtcacttctcccggcgcctgcagagagaccggctgtggcgctggtcaggtaatggcagccatggctggaaaccgggaacaatggggcctgggctggcctgatatctcctcaggaaatgaccggccttcctgaggggccaccgaacgcggccgctttgtttagtttctttagggaaaaaacaaggcacaagtgacatttgccttggcgttcttgaccctccctctgtctcgcctgggtttgggggcccttctcatggcactgtgaggggattcctccctgcctccagcctccacccaccacccaaagggctgctctcccaggacatccagaaagatctctctgcttttccagtcctccccttcccccatcaaagagggcttttgccacacagcataagtctgggccccctgcctttcttgggctgacttttccccaaaattgcaggtttgtcaaagagacctgctgctggggcaggctgagcttggaatgcagcggaactgaggcgagagaatagcagaggaagtagggggcaaagagcacccttgggcgtaggctagcttaagcaatagcaaaagcaaaagatgtaagatagaagaagaacatacaaaataagggagtaagcagtaagaatagaattaacggctgggcgtggtggctcacgcctgtaatcccagcactttgggaggccaaggcgggcggatcatgaggttaggggtttgagaccagcctgaccaacatggtgaaactccacctctactaaaaaaaaaaatacaaaaattagccaggcatggtggagaacccctgtaatcccagctactcaggaggctgaggcaggagaattgcttgaacccaggaggcagaggttgcagtgagctgagatcacaccattgtactccagcctgggcaacagagtgagactccatctcaaaaaaaaaaaaaaaaagaatagaattaacttcttccatggcgataaggagtgacatgttaaccaaatatcgtaccctttagaagatggcttcaaatctaaaaatacactattcctactcctttaagcctcaaaatacgttattcctactccttttaaaagataccttgtagctttaagattgacctttggggccgggagtcgtggctcatgccggtaatcccagcactttgagaggctgaggtaggaggattgcctgaggtcaggagtttcagaccagcctggccaacatggtgaaaccctgtctccaataaaaatacaaaaattagccaggcacggtggcacacgcctataatcccagctacccaagaggctgaggcagtagaatcgcttgaacccgggaggcggaggttgcagtgagccgagatcgaaccactgcactccagcctggggtgacagagcaagactttgtctcaaaaaaaaaaaaaagattggcctttagacttttcattgggtaatagatattttgatggtagaaaatactagaatctggcagagcgcgatggctcatgcctgtaatcccagcactttgggaggccaaggcgggaggatgacttgaggtcaggagttgaagaccaacctggccaacagggagaaacccgtctctactaaaaatacaaaaattagccttagccgggcatgaaggccggcacctgtaatcccagctacttaggaggctgaggcagaagaactcagaaggcggaggttgcagtgagccgagatggcaccactgcactctagcctaggcgacagaagtgaaactccatctcaaaaaaaaaaaaaagagaaagaaactactagaatctgatcctttgcatcagtttctaaaaatctaacttgttacagtcatagagtcaaacgttatgggatgctttggaaaagaagcaaaccatgtggatattaataacacatcaaaatctctcagactgtcttaatattttatggtgtttctttatagtctgtaatttaaaacatcaatcaaatattgccacaaaaagtaatataatagataagggagtaagcagtaagttgggacatggtaagagaagtaagttggaaggacttccagtagctatttggtcgcaaaaaataaaagtaaagatgggcaatttggtcagaagaggtaaagtgggggtaaacaaggttgaacaactatcttacaagaaataaagtagggtgaaggcactataagagaaaggcaagtgacattaagcaagtgaggaaaaacatgtaaaaggccgtgaaatgtaacaaaccggcactgataaccactcacaggtcagcccactcacccctctccgagagtgtcgctgtgcttaatcatttgctgcttcgctatttgtacgtgtgtcatgtccaattctttgttcatggcaccaacagcctggagctgcgcggcaccatctggtaacagaactaggaagctctcctcagcttttggtgtgggtgacatacgcagccctatgagaggcccctccccagcatgcacccctaaacaaatgcgtactctactgggccactatgcaggagcttcctaagatatacatcatttctgctgggcgtggtggctcatgcctgtaatcctagcactttgggaggccgaggcgggcggatcacctgaggtcaggagttcgagaccagcctgaccaacatggagaaactccgtccttactaaaaatacaaaaattaatcgggtgtggtggcgcatgcctgtaatcccaggtactcaggagactgaggtaggagaatcgcttgaacctgggaggtggaggttgcagtgagctgagatcacgccattgcactccaacctgggggacaagagtgaaacactgtctcaaaaaaaaaaaagatatacatcatttcctttcactcctctgtttgagaccagaaaaagtcaatttacagcctgccataatacagcctttgcttacctttcaagcctagtctctcaccacttccttccttgcacctacattatggctgctagaatttctagttcctagcactcttcatctgtctgtgcctttgtcggggctgctcccctacttggaatgccttccccacttctttccaagcaaattcctacccatccttcctaactcagttcaggaatccatttctccagaatttttcctcgtcttccccagactgagctgcccttcctctgcaacccccttacctccctggttttccctctgtcggatactttttttttttttgagacagagtcttgctctgtcgcccaggctagagtgcggtggcgtgatcttggctcactgcaacctccacctcacgggttcaggcaattctcctacctcagcctcccaagtagctagaattacaggcatgcgtcaccatgcccggataatttttgtatttttagtagagacggggtttcaccatgttagccaggctggtcttgaactcctgacctcaggtgatcgcccaccttggcctcccaaagtgctgggattacaggtgtgagccaccgggcccagctgtcggacccttttatttttttttgagatggagtctcgctctgtcgcccaggctgcagtgcagtggcgcaatcctggctcactgcaagctctgcctcccgggttcacgccattctcctgcctcagcctcccaagtagctgggactacaggcgccccccaccacacccggctaattttttgtatttttagtagagacgggtttcaccgtgttagccaggatggtctcgacctcctgaccttgtgatccacccacctcagcctcccaaagtgctgggattacaggcgtgagccaccgcgcccagccagacacttttattataggatgtgtcataatggcctgtcctcccccaaatggactgcaatctccttgatgacagggagagtgtctggaacctagtagatgatgaaaaagcattagtgcaatggatgattgtctagatggatgaagacaaactactgtattgtctgaatcagatgatcactgccttgagggtgccatattgtttctgaaatgccaccctctaggacttccccatggtaaagctaagacagatacaaactggccacagtcaaaaccagattcctctacctcagggcaagaaccaagaagtaatggcttccagctagaaaacaattcctctctctgacctatggttcagtggaagttttgataagagccttgaacagcaatacacactttacccatttatttctaaaggaatgttttccattgcgttatttgctgttgttttgtgctcgccattccccactataagctatcttctttggcaacctactggaaattaccctcacccatctaccaaattttgatgtgggaacagaaaaggaaacaccatgattaataaaataaattttggcttcaatggtaatttttagacactgcagagtaagcaccttttgcagagcaacaattcaaatgatagtgataaatgccaagaccccagaccccgtgccctcaagttccaaagtaaatttctaaaatgtggcaattgcttcataaatgattctaatattttcaggataccatgataaaataaagctttatttcaaaaataaatgttttttttagaaaattgaaaaattgtatcccataattcacactgtgtaccagaatacattccaaatggaccagtgatatgaatgtacaaataaacccataagagtcctagaaggggccaggcacagtggctcatgcttgtaatcccagcactttgggaggccgaggtgggcagatcatctgaggtcaggggttcaaggccagcctggcccacatatagtgaaaccctgtctctactaaaaaatacaaaaattagctaggcgtggtggcacatgcctgtagtcccagctacttgggaagctgaggcaggagaatcacttgaacctgggaggcagaggttgcaatgagccaagatcatgccactgcacttcagcctgggcaacagagcaagactctgtctcgcaaaaaaaaaaaaaaaaaaaagttctagaagaaaatacaaaagaagaaaagaagtccttacaaccttgaatggcagaggctggtttaactaaaacttaaaatccagaagccataaaattgattgataaattgtactttatgaaaaaaaagttctgttttgccaaaaaaaaaaaaaaaaaaattagtcaagagaaaaactactaactggaaaaaatgtttgcaactcacatcacggacaaagagctaacttccctagtgtgtgaagaacactcataaattaagaagaaaaagttcgggagtctgtctaagctactctggcttgggaggctgcctgattaaaagaaagaaaataaaagagaagaagaaaaagaaaagaccaacaatccaatagaaaaatgggcaaagaatatgaacagatagtttccataatgtaagaaaaagtatctgaaattggaaataggcaaaaatgagtactgcatgcctgtccagggtttacctcacactctaaggttattaacgtttgtttgacttgctatttacagtagactagaatactttacaatcagtaggggagggtaaacattaacttgtagaaagtcagtaaggatgcaaaggattcttattatctgtggcagaggggtgggtggcagaaactgagcagttggggacttttctttgtaaagctttctgtacttttgttatttaaatcatgtgactgtattaccctttcacttttttcttttttttttgagatggagtcttgcgctgttgcccaggctgttgtgcagtggcactatctcagctcactgcaacctccacctccagggttcaagtgattctcctgcctcagcctcctgagtagctgggactacaggcatgtgccaccatgcccagctaattttcgtatttttagtagagatggggtttcaccgtgttggccagactggtcttgaactcctgacctcgggtgatccacccacccaccttggtctcccaaactgctgggattacaggcgggagccaccgtgcccggcagtattacctttaaaattttaattaagaaattgaatttctgttcagctttatgaagtattatataattgacataaaataagctgtgtttaaagtatacactcagaaaagtgttgacatgtgtatactgatgaaacaacctccacaatcaaggaagcagacacatccaccacccccaaaaggttcctatgcccctcgtctcccttgccctctgcaccctccccactgcaaagattgatctgctttctgattagtttccatgttctggaattttgtaaagattcatacagtatgtaccttttattattattatcattatctttggtgtgtcttttttctttttcttttttttttttttttgagacagagtctctctctgttgcccaggctggagcacagtggcacaatctcggctcactgcaacctccacctcccaggttcaagcaattctctgcctcagcctctggagtagctgggattacaggcacctgccaccacgcctggctaattttttgtatttttagtagagacagggtttcaccgtgttagccaggatggtctcgatctcctgacctcgtgatccgcccgcctcggcctcccaaagtgctgggattacaggcgtgagccaccgcgcctggccttttttttttttttttttttttttgagacagggtcttgctctgtggcccaggctggagtgcagtgccgcaatcttggcttgctgcaacctctgcctcctgggttcaagcaactctcctgcctcagcctcccgagtagctgggatcacaggtgtgcaccaccatgcccagctaatttttgtatttttagtagagatgggatgtcaccatgttggccaggctggtctcaaactcctgaccataagcaatccgcccacctcaacctcccaaactgctgagattacaggcatgaaccaccgcacccagccaacatcttttttttgagacagggtctcactctgtctcctaggctggagtgcagtggcacaatcatggctcacggcagcctcaaactcctgagctcaagcaatcctcccacctcagcctcccaagtagctgggactacaggtgtgcaccaccacgcacagctaattttttactttttgtagagacagggtcttgcccaggctggaatccagcttcttgtctcagaagatcctccagcctcagcctcccaaagtgctgggattataggcatgagccactatgcctggcctggcctttttcaatatagtaaattgaatgggtttttattcgtttgtgggcctctcctttctcctcacttcttccccttgaccttggtggattccttgattgggttgaggcaaaggttcccacacggctttggcttcttggtaactgatcaagagactgactcctacataaccaagggaccccaggagttcccaccaggcttaacaaactcacccaggaccctgtttctcccatggtgttgttcgcttcttctcagccaagcagaattgaaggaggacagacacacagttattcctacctgcagtgctcctgccttcaaataccggggaagtaacgcagatccgaaacatagcgactcgttaactgcacagaaaaagctgtctgctggaataaacttcaggaagtggtttttctgagcaactggaggtggagtggggggaggaaggcggaggcaggtgggcaacagacatgtcggagggcacagcaggccaaccacctatttcatgacaatggtgattggaaatgagattcaccggccgttccatttcccccacctgtagcctcagatctcattagtcttggagagttgatgagccagactcaacagcccccatccactgggtttgggacacaccccagcctgggagtgaacgtgcactaatgcgtaaatcagaagcctgggttccctgtctgttctctgcagcttaatagcttaaatgctctgaggctcatgttcctcacctatataatgggaataatgtgcccatctacccattgaataggcttgttaggaagatcaaacaagagctagcctttgaaagcacatttaaccagcagagcacagtaagaacatagtaacaacaaaaaaatataaaaaatagctgcatacggtggtgcatgcctgtggtcccaactactcgtgaagctgaggtgggagcaacgcttaagcccaggagtttgaggctgcagtgagccacgatcacaccactgtactctaacctgggcaacagggcaagaccttgtctcaaaaagtaataataattaattaaaaagtttaaaaaaaacaatagttatgattgaacaataataacaacagttgttgatctggtttggctgggcctgccacatctgaatcgctgctctggagctcagctgacttagtgaacccaaggggcagcgctcagtgccttttcttccacacccaccatatgctgccctcaccaccccagtctggcccctcacaaagttgggcagctgggcaaaagggaggcaggcagggacattgtggaggagtctgtgctattccatcccctgcaggaggccccctccagttacaagggacatggttgttttgtttttgggattttttggggttttttttgagacaggttcttgttctgttgcacatgctggagtgcagcggtgtgatcacagctcactgcaacctccgcctctcaggttcaagccatcctcccacctcagcctctcgagtagctgggactgtaggcatgcaccaccacatccggctaattttggtaatttttgtagagatggggtctcgtcacattgcccaggctggtcttgaactcctgagctcaagcgatttgcacgcctcggcctcccaaagtgctgggattataggcatgagccaccgcacctggctgacatggttgtattatgactcataaccataggcatttttgcctttgtagacctcttcctccacaaaaaaaaaaaaattacattttgaaactgtactggtataaataagaagatattcatattatatatttaaaaatttcttttacctagacagtggttttattcttctgatgactgtatcttctaaacctaatgaagaagggcctgacaacagatcaggcacacaacagcccaaggggttaagggacctactgtcttccaccctgagtggcctggccgctggcctgggaagagcaccaccatgtcccaggcactgaagccaaaacaggtgtttgtgcattctgttctcaaaaccacaaaagcacaagcaacaaaataacaaaaacagataaactagactgtattaaaattaaaaatgtttttattgcaaaggatagcattaggaaagtgaaaggtaattcacagaatgggagaaaatatttggaaataatatatctgataagggtctaggatcttgaatatataaagaactgttacaactcaacaacaaaaacacaaccattttaaagaattggcaaaggggcagggcgtggtggctcacgcctgtaatcccagcacttggggagcctgaggcaggaggatcactcaaggtcaggagttccaagaccagcctggccaatatggtgaaaccccatctcagctaaaaatgcaaaaaattagccgggcggtggcacatgcctataatcccagatactcaggagctcaggaggctgaggcaggagaatcgcttgttcccaggaggcagaggttgcagtgagctgagatcatgtcactgcactccagcctgggcaatagagtgaatgagactccatcttaaaaaaaaaaaaaaaaaaaaaggatttgagcagattatttctcctaagaagataaaaaaaaaaaatgaccccaagcacatgaaaagatgctcaacatcattagtcattagggaattgcaaatcgaaactacaatgagataccacttcatacccactaggataactataaccaaaaagacagacaacaaatattgatgaggatgtagagaaacaggaatgcccatatgctactatggcattgtaaaatgatacagccactttgaaaacagttggtggttccccaaaattaaaaatagagttaccatgtgatccagcagcaattcaacccttggggatatagtcaagagagctgaaaacacgtccacacaaaaacatgcacacaaatgtttatagggctgggcacggtggctcacgcctgtaatcctagcactttgggaggccgaggcgggtggatcatgaggtgaggagatcgaggtcatcctggctaacacggtgaaatcctgtctctactaaaaatacaaaaaaattagccaggcgtggtggtgggcacctgtagtcccagctactcgggaggctgaggcagaagaatggtgtgaacccgggaggcagagcttgcagtaagccgagatcgcgccactgcactccagcctggggcaacagagcaagactccgtctcaaaaaaaaaaaaaatcacaaatgtttatagaagcagtattcacaatagccaaaatatagaaacaacacaaatgttcatcaactgatgaatgagcaaacaaaatgtgttatagccatataatggaatattatttggcaataaaaagaataaagtactgggcagggcatggtggctcacaccggtaatcccagcactttgggagcccgaggctggagaatcgcttaaagccaggagtttgagactagcctgggcaacatagccagaccctggctctaccaaaaaaaaaaaattttttttttcacctcccaccaacttctctcaaaaaatttttaaaaattagcctggtgtggtggtgtgccccggtagtcccagctactctggaggctgagatgggaggcttgtttgagctcaggactttgaggctacagtgagctaggattgcaccgctgcactctggcccaggtcatagcatgagactctgtctctaaacaacaacaacaaaaggaacgaaatactgatacatgctacactatagatgaactttaaaaacatgctaagtggaagaagctacacatgaaaggccacatattatataattccatttctatgcaatgtccggaatacgcaaatccatggagatggaaagtagtttggttggctagggctgggggattaggcaagatagctaaagaatacaggtttctttttgggataatgaaaatgttctaaaattgattggggtgatggttgcacaactctgaatatatgaaacaccattgaattgcacgctttaaataggtaaatggtatggcatgtgaactatatctcaatgaatctgttattttaaaaattttagagggtatgttttcatttcctgtggctacagtgacaaatacccacacacttcctggcttaaaacaacagaaacttattctttccccattctggatctagaataagtatgaatggaccaaaatcaagctgccagcagggctacactccctgcagaggctctgcgggaggagaatctgttcctggcctcttacaggagcagattggtggctgctggcattccttggtctgtgggtgcatcactccagtcttcaaggccagcatcttcaaatctctgctcaatcttcacatcacctctcttctgtgtgtctaatctcccttatttattatttatttatttatttgagatggggtctcaccctgtttccaaggctggagtgcagtggttcaatcacgactcactgcagccttgaccaccagtgattctctcacctcagcctcctgagtagctgggaccacaggcacacaccaccatgcctagataattttttaattatttgtaaagatgaggtctcgctatgtttcccaggttggccttgaacttttgagctcaagggattctcctgcctgggcctctcaaagtgctgggattataggcataaaccaatgtgccccgcctccctctgcctctctggtaaagtcacttgtgattgcatttggagcccatccagataatctccccaactcaaaactgttaacttaatcacatctgcaaatcccattctcccacatgttacaaactgaatgtttgcatccccgcgacaattcacatgttggaaccaactccccagtgtgatagtacttgcaggtggagcctttggaggtggttatgtcatgagggtggaggcctcatgaatgggactggtgcccttatgaaagggaccataagaaaatccctaggcccggtgcggtggctcacgcctgtaatcccagcactttgggtggccaaggtgggcagatcgacgtgaggccacgagtttgagaccagcctggacaacgtagcaaaatcctatctctactaaaaatacaaaaattagctggcatggtggcgcgcctgtagcctcagttacttgggaggctgaggcacgagaatcacttgaacccaggaggcaaaggttgtggtcagccgagaccgcgccactgcactccagcccgggtgacagggcaagactccttctcaaaacagaaaaaaaaaaaaaaaaggcaagaaaagaattccctagtcctttccatcatgtgaggacacagcagagagacagccatctataaatgaggaagtaggcctcaccagacactggagctgctggagctttgatgctggacttcccaaactccagaactgtgagaaatacatttttgttgtttcttttttttttttttttttgagatggagtctcattcttgttgcccaggctggagtgcaatggcacaatttcagctcattgaaacctccgcctcccgggttcaagcgattctcctgcctcagccagctgagtaactgggattacaggcatgagccaccatgcctggctaattttgtgtttttagtagagatggggtttctctgtgttggtcaagctgatcttgaactcccaacctcaggtgatccacctgcctcagcctcccaaagtgctgggattacaggcgtgagccaccgcgcccggcccatttttgttgtttctaaggcacccagtccaaacaaactaagacaccatatagggcaacattcacaggttccaggggtcagggcctgatatccttgggggtcatcagcagcctaccacaggggtatcatgacccatattacagatggggagctgagggccaggaggtgaaacatcaaccaagttcccagcaccacatctgcctgcctgtgtctgcctggcttgctacaaggcttctgtgactgaccttttacagcacctttctgggcagaaggctcagacccagtccctgacctgacacacatgagtcatgagaccagagccagcttcatagatgtgtgacccgtgccgtcacaggggccctgtgctcagaagctgccatgcttggtttgatgccttgctgtcgccaccttgaaattcctgataattttgaattttcatttgcactagacccacaaattatgtaactggtcctacatgtgacactgagcaagaaaagggagagttgagatgaggtgggtagaagctgccctgcccacggcctcacctcagacctgaaaagtacctgacaccccgatcctgcacagcctaaataattgcattgttttatatgaaagaagaactagacttttttccactttcggtggaaattatagggaggtatatttcagccagaactgtgcaacacagcaggtaaggaaagttttgcaaatgttttaaaaggccagatgagactgggcatggtggctcatgtctgtaatcccagcactttgggaggccacagcaggcggatcacctgaggccaggggtttgagactagcctgggcaacatggcgaaaccctgtctctattaaaaaaatacaaaaaggtcaggcgcagtggctcatgcctgtaatcccagcactttgggaggctgaagcaggtggatcacttgaggtcaggagtttgagaccaacttggccaacatggtgaaaccccgtctatactaaaaatacaaaaattagccaggcgtggtggcatgcgcctgtagtttcagctactcagagggctgaggcaagagaatcgagtaaacctgggaggcggaagttgcagcgagccgagattgcaccaccacactccagcctgggccacagagcgagactctgtcaaaaaaagaaaaaagaaaaagccagctgagagagagggaggtgattcctaaagctgcggagtctcctctgggcccacctgaggcaaacccagcctccaccaagaggcaagttttgtgtcagttcccaagaactccagaagccatgtgggccactccttcttcttttagggggagaatgtagctgtcaaatatctcttcatcttattaataaagctaacaaggagccaagtatttgtcaaaaccaatgccaggggtcagagcagtgtcccgctgattgccacagctgaagacaaaggaaaaggaaggaagactgtcatcgtcaatgtggttgccattgcaaaggtggctaggtggcctctgtcactgtgggctgggaatcatagctctagtctgatgctaaaaaggaccatgcaactgttcatggagcgcacaaatgactgcccagacaacataaaaaaacagcatctggccgggcacggtggctcacacctgtaatcccaacactttgggaggctgaggtggccggatcacttgagatcaggagttcgagaccagcctgaccaacatggtgaaaccccatgtctactaaaaatacaaaaattagccgtgcgtggtggcacaagcctgtagtcgcagctattcaagaggctgaatcacttgaacccaggaggcggaggttgcagtgagccaagattgcaccactgcactccagcctgggtgacggagggagactccgtctcaaaaaaaaaaaggtgtctgtgttcccactgtggaaacctaagcagattggctggacaaactttagaatgacagggaccccaaaaacagaaagaaaagcaaaatgcagcctagtctatccccaggggcggtggggtcgtctggggacaacagaaggatgaaggcccaggatgaggcagaaaggagctgatctgggggtgagggaaacagggagagactgactggttgactttgggaggggtgtcagggacgctggggccactaccatgactctgagggagacacaagtttttcatgggtttttctctgtgcagagtggtgtaagtctgctctcacatctcccttccagcaaccttcaagcaacctctagtagagatttgaagtgggatttctttcttttcttttttctttttttttttttttttgagatagggtctggatctgtcacccaggttggagtgcagtggcacaatcttggctcactgcaacctccacctcctgggtttaggcgattctcgtgcctcagcctcccgagtagctgggattacaggcatacaccaccatgcccagctaattttttgtatttttagtagagatggggttttgccatgttggccaggctggtctcgaactcctgacctcaagtgatccacccaccttggcctcccaaaaaagtgctgggattacaggcctgagccactgcccccggccttagagtggggtttctgttctcatttgactgtgtcatggttctgagacgaatcctcaggtgagaaagcaacgggcctggcttccttgggctcctcagccatggccctcccagagcccaccatgcctggaggacccagcatgggccacagacatgcaccttcattctcacaagttcatccgagaggaggaggaaggaaaagccaaggaaacccaaaaggcaggttagagaaagaagtcactctgtgtccgcaaagagctcccctcccctggccctgtgcccttcactctctataggtcaaggttttgctggactgtttccagtgtttgagcctgaatccaccacgccggggctccctgatgcactaatccggtgttcaaagaagggaagggctgtgtggccctgaacctgtgcctacacagcagaaagaattccaacctttccttatcagacataaagtggatctacaaagggtcacattagagagttttcctttttaaatggctctacaaatgttctgaggtaggcggcggaactcaactccaaaggtagggcttggacactggaccaaattgaagactagctaaacagggactgagagaaagcagctttccataagacacgcccaccagtgtgccgtgtcagtttaccgttaccatgacaacaccggaagttaccacccctttccatggcaatgacctgacaacccagaagttaccaccctttttctagaaatttctgtatagtctggcccttaatttgcatataactagatgggcacacatatgatgcagaactgccctgagctggtgctctgggcacactgcctatagggtagccctgctccacaaggagcagtctgtctgctgctgctgtgcactgccgcttcaataaaagttgctgtctaacaccaccggctcccctagcttgcccttgaattctttcctgggcaaagccaagaaccctgccaggctaagccccaattctggagttcacctgccctgcatcagttgcacgtagcacagtttcattagtttggccttgaggggccaagagcaatcctgctttgcaccacccaccatgaaagggagcaggagctggcggggtgcggtggctcacgcctgtaatcccagcactttgggaggacgaggcgggaggatcacctgaggtcaggagttcgagaccagcttggtccaacatgatgaaacaccatctctactaaaattacaaaaattagccaggcatggtggcaggcacctgtaatcccagctactagggaggctgaggcaggagaatcacttgaacccaggaggcagaggttgcagtgagccaagatcacaccactgcactccagcctgggtgacagagcgagactccatctcaaaaaaaaaaaaagaaaagaaaagaaaaaagaaagggaggatgagctgccctgggggaggtttgtggacttctgaactcatgtgagccaagtctaccaagcctcagctcaccagcctgtagattgctcctcataaggccactgcgggcctcaatatcataaaactctatagggatatgggtcacgttaagtattgtcctttgacctcatatcaaatgaacaagcatcaggaaaaattgtgaaagggtttgaaataggcctaaaacattcctgggtgtcttcaacaaaaagtagaggcaatctagcacattcttccagcttatctgactctttgaggtttctgtgcctttcattgtctttgagatatcttataattttccaggttgtccagagaaatgcaagttgtgaccagtggggatgatgcagttgataattcccctaatgatattgagcaattttgcatcttttgttttgaggcggagtttcgctcttgtccaggctggagtgcaatggcacaatctcggctcactgcaacctccgcctcctgggttcaagtgattctcatgcctcagcctcccgagtagctgggagtacaggcatgcaccaccacgcccagctaattttgtatgttttggtagagacggggtttcttcatgttggtcaggctggtctcaaactcccgacctcaggtgatccacccgcctcagcctcccaaagtgctgggattatagccgtgagccaccgcacccaaccagttttacatcttttaagccaactcattttagcatccctgatggtagatatctgcatatctaatgatcaattggtcaatcaatctaatcatatatacatatcctctttgattctcctttgagtaagttatagcatttcactggttcactcattaattgataagttaaataaaatatttgacacatgttcatattatatttgcatgagagttatgattttactcctaaaaattataagactccgctatggagcttttatttaaataataataactaatatttattgagtgcttacatatttctcacgtttcctttaatcctatgagtcagttactgttattaccctctttttacaagagagaaacaagactctcagagaggttagtactcttgtccacgatcccacagctgaagtggtgatgctggctgcctgccttcagccctgagccctaattcctcacacagggcctctggaagaaaaacatttcagggcccggtgcggtggctcacacctgtaatcccagcactttgagaggccaaggcaggtggatcgcctgaggtcaggagtttgagactagcctggctaacatgatgaaaccccatctctactaaaaatacaaaaaattagctgagcatagtggtgcacgcctgtaatcccagctactcgggaggctgaagcaggagaattgcttgaacccgggaggcagaggtgagccgagatcacgccatcgcacacaagcctgggtgacagagtgagactctgtctcaaaaaaaaaaaaaaacacaaaacagaaagaaaaacatttcaggacttcttgaaatactccacaatagaaaaatctttggtctagaacaaagatggaagggatcaaagtctgaaacagttgaaatacactgaatgtaacatatgtattcaccaaggttatgcaaggatgtaatccttcaccttgttctataccactgtctccatgtttcctgtttctttagagcttcattacctgattaaacacaattgaaataaatagatacgtaaaaatcaaaaaggcagccaagttggggtatgagaatatgcacaggaaatggtgcttctagacagaaatgagattcatgtgatttaggaccacgtcaggagcctgtgtaaacattcctaatactcagaatgtgagaacacatctgggcttgtggatgaatacctcccaaatgtcaaggacgtgctttaattagagctttttaaaaatggaccagttgcagccagcgctatggctggtgactgtaatcccagcattttgggaagctgaggcgggaggatcacttgagcccaggagttcgagacccccctggacaacatagtgagacaccccatctctacatgaattttgttttttaattagccaggcatgggggtacatgcttgtggtcccagctactcgggaggctgaggtgggaggattgcttgagtcgggaggtggaggctactgtgagccatgattgggccatggcactccatcctgagcaacagagcgagaccctgtctcaaaaacaaaacaaacaaataaacaaaacccagaaaacttggttgtgatggtgtactgtagctttgcaaaatgttaccattaggggaaactggcacatatctctgtattatttactgcaaatgcatgcaaatgtactattatctcaataaaaatatttctatttaaaaaatagggctggatgccatggctcacacctgtaatcccagcacttttggaggctgaggcaggaggatcacttgaggtcaggagttggagaccagccttgccaacatggtgaaaccctgtctctactaaaaacacaaaaattagccaggtgtggtggcacgtgccgtgggcccagctactcaggaggctgaggcaggagaattcgcttgaacccgggaggtggaggtcgcagtgagccgagattgcaccactgcactccagcctgggcaatagaccgagatttagtctcaaaaaaaacaaaacaaaacaaaacagaaaaccttgaattttcacattgctctttagaatgtggaaggaacctggaaattttctctgagggtgagagggagaaaatatgctcccaataaggggaaattctaaacggaaaacaaacaggaacattttgcacctagaaaagatcttgtatattcagggaggtaaaggggatttctgcaaatcattgtgagatgcattgacaagcctcagctcctaaatgaaatgtttttctcccaggtcgtttgaaggccagtttccccagaaagctactcttagatgaacctctcttaagagagagatgggcaagtaggaggtgctcttagctccctctctcccatcccccataggatgaggctacagaggaatcccttaggtcaacttacagagaaggaccctgaggccctgaggttggccatgtcttgtctgtgtggccagcaaggggactgctgggcctggcagtgtctcaggacttcctggccagggagcttcctttgttgtctctggaatccccccttgccctgtgtccttgagtctaggacctggcacaggtacatgtgatgccatgcccagggtgctgtaatccaggcactggcctctaaggaatggttacggagggccagaccaagtccagcagagccagctctcaccaggcctgtgcagtgggtgagcatatgtgatgggaggacatatgcagtgggtgggcatatgtagtgagtgggtatacgtagtgagtgggtatatgtagtgagtgggtatatgtagtggatgggcatatgcagtgagtgggtatatgcggtgggtgggcatatgcagtggatgggtatatgcagtggataggcatgtgtaatgggcaagcatatgcaatgggtgggcatatgcaggggttgggtatatgcagtggataggcacacgcactaggtgggaatgtcatgggtgggcatatgtcatgggtgggcacatgaaatggacaggcatatgtcatgagtgggcatatgcagtgagtgggcacatgcagtggatgggcatgtgcagtgggtgggcatatgcagtgggtgggcatgtgcagtgggtgggcatgtgcagtgggtgggcatatgctgtgggtgggcatacgcagtggatgggcatgtgcagtggatgggcatgtgcagtgggtgggcatacgcagtgggtgggcatacacagtgggtgggcatgtgcagtgggtgggcatgtgcagggggtgggcatacgcagtgggtgggcatacgcagtgggtgggcatatgcagtgggtgggcatatgcagtgggtgggcatatgtgatgggtaggcatatgcagtgagtgggcaaatgcagtgggtgggcatatgtcatgggtgggcatatgcagggctgggcacctgcagcaagtgggttgtcgcgggagactttgcccacactaagagactctgagtttcagttttctgccgcctaacatgatatacttgcgactgcctgtaaatccatttttaacccccaactagggaagctgaaggaagaggaacagcagggccaccagctcagcccggtggctgcattgttctcccctgacattgttctcaggccggctctgcttacccagaaggcccccgtaacccctggggaatccgatgagattgtttttcccaagactgggctcttcaggtgtgagctgcagttcttgggccacgtaggttactgtggcatttctgcagcaggaaagaggaaggaacttctgatctgtggggcaacggcatcaacaatgtgcacccccaccagccggcagcgcgaagaggaaaggagctcagtttccatagtgataaatcacgaggaagggagcctggagggagccggcagtaagacttctcccttcccctggctccctgcaaacgcattcccaatgccagagtcagttagccgcctggcgcctctccagactgagcccccagaaccgcaggtagaggaagacggaaggggctctgccagatggaaaacaaattcccagctcctcttcaatgtgtcagtaaggcatgggtgcccgagcggatgcgtcggggcccagggctgtgccacacctgggtggccaccacatgcgaagctctcgatgcatgccacctacattattccattccattctcttctattacgccctacacacgactgtgttctattaaatgagcccacagcacaggtgctattagcccttttatcacagaagaacaaacaggccttgtgagggagagagatgcaccagagacaattcaccaagttaacaatagctcctgaaggtctcaaggctctcttctgagattctttctcttgccaaaatcagactattttccccaaagaaaacatttgagtttttttgaaatgttctgggaagtcgtttatcccaaacgtcatcagccactctttatgcaggccacggtctcttgcctgtaacccttgcatgtgctgttccttctgcttgaaatgctgttccctgcttccttggtcagctaactcctcagggtacttgtctcatccctccttcccagtagctcagatgccttgctttctgggctcccacagaacttacaccatattatgaagcaacacagagtaatagtaggagaaaaggctcttctaggcccagactagctgtgtgacctcaggggatttgcttaacttctctgagccttgatttcttcataggcaagatggagagaatgcgagcatctgcctcacagtgtgtctgtgaggattggacattaacatatgtaaagctcttagaaaatgcttgcctgcggttaatgctctagaaacattagtcactaaagaattaagttcttaaagcaagagccattcttcatggatatctctagatctagaggcttaggcccaactgggtatggagcaaatgtcactctggattcgtgggagactattttccagctacactttaggcaacaggcacggtgctaggcaccttgattcataagatttaatttagttaagtcattccaggactggtctcagatagcccaggaccagcattttgtcactgtagcctgcagcattctcgaatggccctctgatcacctgatatcccctccagacttcctgccctgcccaggcctgaaaagagtccccacactcagtgacaggtgaagaggccctcagccttgccacaacaggggttacccatgtggtctgtaaacaccaagagatttaaataatggacatacctgcatcccaggggccactcagacggcaaaagacaaaccccaccttgggcagccactctcctccatggttccacttgaaaaaatgaaatgaaactcttcatgcaaatactcgggtgctaaacagttatgtaacagccaagtctctccacttaaaaatacagtcttctccaaatctatagagacaggatgccgaccagaggttgcctgggacttggagagggatcggaggacgactgccattgggcaagagggaacttttgggggtgaagaaaatgtgctcaactggatcgtggtgatgcttgtacaactctgtcttcacaaattgtagggttcccgaatttcgtcaataaagatacaggatgcccatttaaatttcagataagcaataaatactatttttaatataagtatgtctcagatgggacatccttgcatattgcatgggatatacttacactaagaaagtatttgctgggctgggcgcagtggctcacgcctgtaatcccagcacttcgggaggctgaggcaggtggatcacctgaggttgggagttcgagaccagcctgtccaacatggagaaaccctgtctctactaaaaatacaaaattagctgggtatggtggcacatgcctgcaatcccagctactcgggaggctgaggcaggagaatcgcttgaacccgggaggcggaggttgcagtgggccaagattgcgccattgcactccagcctgggcaacaagggcgaaactccatctcaaaaaaagaaaagaaaagaaaagaaaacatttgctgtttaccggcgcgatctcggctcactgcagcctccgcctccctggttcaagcgattctcctgcctccgtctcccaagtagttggaattacaggtgcgcgatctcagctcactgcagcttccgcctccctggttcaagcgattgtcctgcctcagtctcccaagtagttggaattacaggtacgcaacacaaacccagctaatttttgtatgtttagtaggggcgggggtttcaccactttggccaggctggtctcgaactcctgacctcaactgatctgcctgcctaggcctcccaaagtgctgggattacaggtgtgagccactgtgcccagcctggaattcacatttaactggatatcctgtattttatgtgcaagcctaactaagagaccctgaattaattgtacacttataatgggtgagttttatggtaggtaaagctgttaaatttagcacaatgcctagaataatattgttgcttaaaaaaacacagctttggctgggcagggtggctcacacctgtaatcccagcactttgggaggccaaggcaggtggatcgcctaaggtcaggagttcaagaccagcctggccaacatggtaaaaccccatctgtactaaaaatacaaaaaaaattagccgggcctggtggcaggtgcctgtaatcccagctactagggaggctgaggcaggagaattgcttgaacccgggaggtagaggttgcagtgagctaacatcacaccactgcactccagcctgggtagcaagagcaaaactccatctcaaagaaaacaaaaacaaacaaacaaaaaaacccccagctttaccttccatgcacttcctccccactgtcacctctagcaaaatacaactgcaaaaaccatcccaccttcccaggaacccatagaagccaccaaggtaggaaatacgtttttttttttttgagatggaatttcgctcttgttgcccaggctggagtgcaatggtgcgatctccactcgctgcaacctccgcctcccaggttcaagtgattctcctgcctcagcctccgcgagtagctggaattacaggcatgggccaccatgcccggctcattttgtatttttagtagggacagtgtttctccatgttggacaggctggtcttgaactcccaacctcagatgatccacccgccttggcctcccaaagtgctgggattacaggcgtgagccactgcgcccggccaataggaaatacattctaaacagtcacgttagctttgtcttcccggtgcccacggcctgcggagggcaagactcaaggtcagaaacatcacaggacaggccgggcgcagtggctcatgcctataaccccagccctttgggaggctgaggcaggcagatcacttgacatcaagagttcaagaccagcttggccaacatggtgaaaccccatctctaactagaaatacaaaaattagccaggcatggtggcacacgcctgtagtccctcccaggtactcgggaggctgaggcaggagaattgcttgaacccaggaggcagaggttgcagtgagccaagatcgtacccttgcagtccagtctgggtgacagagcaagactccatctcaaaacaaacaaacaacaacaacaaaaagaaagaaacaccacaggacaaaccggagagttgggaacagtcctctccttgttggatgctccaaatactaaaatcaaccacctaccccgttttgctgcccagaaattagagaaatatacagactctcattgactgaatggccactaaatgctctgtgcaggctggatgaggggctacaaaaatgagtaccacacttccctgcccctaaggaggtgaattacaaacccacgacacactcacctccaaacacacaatcattcaaagcaaagagagaaagatgtctcatttttcccttctatgggagagaaacttttttgaccttgtccaataaaactaacattcacatatatgtggtgtttgcttttagaattgcattttgtaattagtaagagaacatcacctttttagaattatcacagttccacttgtccatggtcaacacaaagctacttgctagtaggtctggctctcagctatccagatacgaaattctgaccaactaccaaaatcataataacgcattctttaaattcacctcatcggagatggagtcttggagacttaattacatgtgctgttggtgtaattaaacttttttctttgtgaatactgttgtccctcgatatccatgggggattgtaccagacccccacagataccaaaatctcaggatgctcaagtcttttctgtaaaatggcatagtattagcatataacctaggtacacccttctgtatatttaaaataatctctagattacttatggccaactctaggtgtactgcctatgagttagctctgctccataaggagaagtaaaaaaaaaaatcatctatagattacttataaaaccacataagatgctgcacatcatttcgtttgtgggggattcaacatagtactcagcacgtggaaaattcaagtttcaacttttgaaactgtggaatttttttctgaatattttctatccacggttggttgaatccatgaatctggaacccatggatatggacagctatatctgcaaaggggctcttttttttgaatgaggaagactcaatgacattccactctattccttccacttccatggtgccattccggtactagaggatttcacaaaaactgccccatacagtggaggcttcagccactgtaaacttataagcccaagaatcccattacttagctcatcaatgatatgaccacggcaatctgggcatttcaagaaggaaggagatgcattctctctctctctctcttttttttttgagacagacagagtcttgctctgtcacccaggctggagtgcagtggtgtgatctcagctcactgcaacctccacctcctgggttcaagcaattttcttcctcagcctgctgagtagctgggattacaggcacctgccaccatgcccagcttacttttgtatttttagtagagatggggttttaccatgttggccaggatggtctcgaactcctgacctcaagtgatccacccgccttggcctcccaaagtgctgggattacaggaattagtcactgcgcccggcagggatggagttttatcaatttagcaaggttgtcccttatctactggggactttaattaatcaaatatacatataaatacaaatagaaaaatcattgactacttagttaatgctattttggataaaatattcccaataatgagatttataaaatacaaataatgaaggggccaggagtgttggctcatgcctataatcacaacactttgggaggcagaggcaggaggatcacatgagtccaggagtttgagactggcctgggcagcatagtgagactccatcactaaaacaaacaaacaacaaaacaaaacaaaacaaaacaattagctgggcttggtggtgcatgcctgtagtcccagctattagggaggctgagttgggaggatgaggccctggagttcaaggctgtagtgagccatggttgtgccactgcactccagcctgggcaacagagcgagaccctgcctcaaaacataaaataaataaatacataataaaaataatggggggtttttgatggtgaaaaggtaggactgccagcctgctcagaattatggaacattttaaagtagccaaaaacatttttctctgtgataatcaaggtatcaggtatgcatttctgcaggactaaaagaaactctacatacatttgatggtatttttcatgtaaggactaaattcttttaacgagcacctcatttggtttaccctctataggcttgaagcaggagggtatttctgaagggaacttcaacttgtttcttgtctgtttgttttgtttgtttgtttgtttgagacagagtcttgctctgtagcccaggctggagtgcagtggtgtgatctcggctcactgtactcactgtaaccttcatctcccaggctcaggtaatcctcccacctcagcctcctgagtagatgagactacaggtgtgcgccaccacacctggctaattttttgtatttcttgcagagacgaggtctcactatattgctcaggctagtcttgaattcctgggctcacgcgatccttcctcactggcctcccaaagtgctgggattacaggagtgagccgctgtgcctggcctcagcttttttttctttaatttcaagtgactcaaaagaaaaacaagcgaaaataaaaataaagtgttaaggcataaacaattaatgggcagtctttcctccctagcgcttttgaaattacagacacttgacaatgacgccatctagtggaagattagcaggtcagacgaaaacccatctatttgtaatttatcagccgcagcttctcctaaacgctttttttttttttttttgagacagagcaacctccacctcgtgggttcaagtgattctcgtgcctcagcctcccaagtacctgggattacaggggtgcaccaccatgcctagctaactttttgtatttttagtagagacggggttttaccatgttgcccaagctggtctcaaactcctggcctcaagtcgatccacccgcctcagcttcccaaggtgctgggattacaggcgagagccactgcacctggccacccccaacacctttaaaatagctttggacgctcccagtgcttatttcacttttacattgttatttctaatacagacatactattgatattaaaaagtacataaaatatgtaatgcagaaatagtacattgaaaatatataaagtaggccaggcatggtgtctcatgcctggaatcccagcactctgggaggccaaggagggaggatcgcttgagttcaggagaccagcctgggcaacacggcaagacctcgtctccacaaataaaaaaaattagccaggtgtgatgatgaagtatgcctttagtcccagctactggggaggctgaggcaggaggatcacctgagccatggaggtcgaggctacagtgctcaccgcaagttttttgcccccaaaaaacttgcgtttcagcccaaacaccattcccattgagtagcaagcaactttgagcaaatatctcagcttctccctctgtaaattccaacagtaaggctcttctagcactatgtacaaacaagtattttcagccttcctacaaagagacagactacctttatagttacagtttcctttttatttatttatttatttttgacagggtcttgttctgttgcccaggctgcagtgcagtggtgtgaccacgcctcactacagccttgagctccggggctcaagcactcctcctgcctcagcctccccagtagctgggaccacaggcatgccccaccatatctgactagtttttaaattatttgtagagatgaggacttgccatgttgaccaggctgggttttttcatgtgtgaaacagaacacgtcacagggtcattatgagaatggagtcagctggcccatctaatgaactgacctttaaccaggaggtactcagtaagtgctagattcttctctttggaacttgaaagaccagaggagagcccagcaaactcagagaagcaggaaagaccattcataggatgttgttcctgggtgctgatgccccacaattggggctagtccactcctgggatggccagcaaaactcacttattcagagctgtggactgacagagcaagaatcaggagaaatagatgggtttcgtctgacctgctaaccttccactagatggcgtcattgtcaagtgtctgtaatttcaaaagctctagggaggaaactgactgcccattaactgtttatgccttaacactttatttttattttcgcttgtttttcttttgagtcacttgaaattaaatttaaaaagttgaggccaggcgcagtggctcactcctgtaatcccagcactttgggaggctagtgtggaaggatcacgtgagcccaggaattcaagaccagcctgagcaatacagtgacaccttgactctacaataaatacaaaaaattagccaggtgtggtggtgcgcacctgtaggctcatctactcaggaggctgaggtgggaggatcacctcagcctgggagatggaggttacagtgagccaagatcacaccactgcactccagcctgggctacagagcaagaccctgtctcaaacaaacaagcaaacaagcaaaacaaacaaacaagaaacaagttcactcaggtcagctgatgtagtcttcccagaatcctcagcacccccttccctgaagggggtctggaggtccactggcatcactttgggacctagggagtgcagcattctcccaggcggcagcccaggccattccggatacaagacagcaagacagagtcaccagagcccttacttgtcccctgtccctacaaggaaacccaaagccttccttccttccttgtgctcagcctgtggtaaacacccagattttctggaatcgtcttctctccactaacaaaatcttgacaaatcatctcttaggataggtcacttctgctggcagctaagggcctacccagatccttattggctttggtttaaaagggtaatttcagctgggcatggtggtgtacccctgtaatcccagcattttgggaggctgatgtgggaggatcgcttgagctcaggagttcaagaccagcctgggaaatatagcaagacctcatctctactaaaattaaaaaaaaaaaaaaaaatcagccgggcatggtggcaagcacccgtaatcccagctactcggggaggtgaggcgggagcttgatcctttaaccctgtgaccatgtcagggtactttctcttggcttctgccatctgaagggtgggaattttggaggttcatatcatatttagctctaaaaattaacttgagcagctaaaagcctttgcaagctcgaaattgactgctttaggctccttctgggaagagtactagaaattgcccggcaccctagctaagtggctaaggccttatcttttttttcacagtggtggcctcggttcaattcccggcttagggaataagtgctttctggtttgctgtctgtgtgacttttgccagttattaattatcttccctaccatgaacaacttctgacttcccatcttgaattttcctttctctgagctacatttggcgattctagatcttgtaacaactgcttaccacctctttgaaaataccacacacaccaggcacagtggctcatgcctgtaatcccagcactttaaaaggaggccgaggcaggtggatccctaaggtcagaagtttgagaccagcctggccaacatgacgaaaaccctgtctctactaaaaatacaaaaattagctgggcatggtggcacgtgcctgtaatcccagctactggggggctgacgtaagaggatagcttgagcctgggagacagaggttgcagtgagctgagatcgtgcgtgccactgcactctttgaaaataccacacatgccggacacagtggctcacacctgtaatcccagcactttaaaaagaggccgaggcgggtggatcccctgaggtcagaagtttgagaccagcctggccaacatgaagaaaccccatctctactaaaaatacaaaaattcgctgggcgtggttgcgcatgcctgtaatcccagctactaggggggctgacgtaagaggatagcttgagcctaggagacagaggttgcagtgagctgagattgtgcgtgccactgcactctcgcctgggcaacagaccaagactccatctcaaaaaaaaacaaaacaaacaaacaaaaaaaaaaaacaaaaaaatgcacatccatggttaagtcataatcctagttaagtcttattcgtttcacctggaaggttacctttggtcaagtccaaaagccaggaatatcagctatttgtcctggctagagtggtaataagagatttggttaaaagtcaggctctgctctgttttgcattgtgttacctgatgttttttacatttagggtatgagagattacattatgagagagcttttagccttaatgtgtaataactaggtaggaaatatacttcaagggatggctaatggcagttataggggagtactcagttctttgcatgtttggatcagagaagcatgctcttgaccacctagaaggtatggaaacatacccacccacccccactgagagataagactcctataagggatagcctgattccctttatttggggatccaagcctgcttattagtccctagaaactgcatactttcctggccctgttccttaaaaggctccactctaaagccagtaattaactgaggtcttttttttttttttttttttttttttctgagacagagtcttgttctgtcgcccaggctggagtgcaatggcatgatctcggctcactgcaaactccacctcccgggttcaagctattctcctgcctcagcctcccgagtagctgggattacaggtgtgcaccaccatgtctggctaatttttgtatttttacaaaattagggatggggttttgccatgtgggccaggctggtctcgaactcctgacctcaggtgatctgcccacctcagcctcccaaagtgctgggattacaggcgtgagccactgcacctggccttaacttacgtctttaaagaactctccatgtgtaagattttcctggccgtcttgaaactgcctttgcaaaactatgactgagaccgtgaaaaagatctaacttaattgactccatttgcttctaacctccaatctgtccgtgtcctttcctaggcaggctgaactaactttgggagaaacttggtttatagtttaaaacaaagataagtcgggtgcagtggtggctgggtgaggtagcttacgcctgtaatcccagcactttgggaggctgaggctggtggatcacctgaggttaggagttcgagaccagcctgaccaatatggtgaaaccctgtctctactaaaaatacaaaaattagctgggtgtggtggcgggcacctgtagtcccagctactcgggaggctgacacaggacaattgcttgaacctgggaggtggaggttgcagtgagctgagatcccgccactgcactccagcctgggcaacagagcgaagactccatctcaaaaacaacaaacaaacaaacaaacaaagacaataacagccctttcccaaagcagacctccttcttgcctggggactagattgcctttttaggactaacattagccacaagattagaaattatggtttaagagtcatgcagctggaggctgcaagattctgaccctccctaaactgctcctaagatcagggcttgaggtattttgcagaccctgctcctgatggatcagctggcaccacccaggtcaataaactgactcatctgatcttgtggccaccacccaggaactcagtgcaagaagacaacttctactccctgtggatttcattcctgaccaatcagcactcctggcttcctggcttccccctacccacccttaaaaactgtgctccctgaatgcttggggagactgatttgagtaataataaaactctggtctcccgcagagccggccgtgtgtgaattaccctttctctattgcaattctcctgtcttaataaatcggtctgtctaggcagtgggcaaggtgaacccactgagccgttacagtcttaactgcagttattcacacccttttccttggtttgagtaaaatatagatttgttattggaaaggggtctcaatctagacctcaagaaagggttcttggatctcacacaaggggtaatccagggtgagtccacagagtaaagagaaagcaagtttttattagaaaagtaaagaaacaaaacaatggctactccataggcagtgcagccccaagggctgctggttggctatttttggaaatttcttaattatatgctaaacaagggatggattactcatgagctttctgggaaaggggcaaggaattcctggaactgaggatttctcttccttatagaccctataggttaacttccagacattgccatggcatttgtaaactctcatggcactggtgggagtgtcttttagcatgctaatgcattataatgagcatataatgagcagtgaggacagccagaggtagctttcctcaccatcttggttttggtgggttttggcagcttcttactacatccttttttatcagctgggtctttgtgacctgtatcttgtgctgatcttctgtcctgtgactaagaatgtctctctgggagtgcagcccagcaggtctcagcctcattttacccagtccctattcaagagggagttgctctggttcgaatgcctctgaaacatttgctaaatgctttaatatcataaactgctttaactttttctttttttttttttttttgagactggagtctcgctgtgtcacccaggctggagtacagtggctcgatctcggctcactgcagcctccacttcctgggttcaagcaattctcctgcctcagcctcctgagtagctggaactacaggtatgtgccactacgcctggctaatttttgtatttttttagtagactcagggtttcaccatgttggccaggacgtttctttaatttgataattgttcatcttaactgctttggagccattagattctaagtaagccccattagattctagataatgcctaacctcctaggaatgcagcccagcaggtctcagcctcactttacccaactcctactcaagatggagtcattcttgttccagtgcctctgacacactccccctcccttttacagggagacttttcatcctaagtgttgtagagcgatgaggatccatcatctgtaatttctttaggagaaataagggtgatgacattcctgcctaactattagtttctctagtattcagggtagagagaagcttaatcagagagcattggtatggtcaaggccaatcataactctgagttctgacaaaaggtgatatttagaagattaacaggtgttcaatttaagaaattatctaaagtaaactaagtaaggaggctttccatgaactagacaactgttggaaccaaggtgatatggagtcgctagccaattccatctgtcccagaattagatattgatccagatttttttttttttaattgagatggagtctggctctgtcgcccaggctggagtgcagtggcgggatctcggctcactgcaagctccgccttctgggttccggccattctcctgcctcagcctcctgagtacctgggactacaggggcccgccaccacgccctggctaatttttctatttttagtaaagacggggtttcactgtgttagccgggatggtctcgatctcctgaccttgtgatctgcccgccttggcctcccaaagtgctgggattacaggtgtgagccaccgcgcccagccaatccagatttttatattactcattcctctcttttcctgagcagctgccagaaatcactggttggttcccaggaataagcagggtcagtttaaattgcagaaaaaactaaaaagattttttggctttttattagttcagtctatgcagttagttcctgttttgctcaatgcttatagactcattttccaagagagtcttggaagttctttcctctcctttttaatggcaaactttgcaaagttatcagaaacttgcatttaagagtccttgtcagagttctatagctgattataagccaccttttgaagaggatcaaaacaagacaattgtctgtagatgatgtgaaaggaaaataaacctcgggactctgaaatcactaagcaaaatggaaaagtcacactgggaactgcgtcaggcaaacctgcctcccattcttaataagatagctacaaagattaaaaaaaaaaaaagccatatacctcccttacaatttgcccacaagtaaattccttgtgggtctcaagatctttaccttagaacattctgttgaatttcaccctggcaatgtaaattgatagcttattttcacaggtgcaggacaaagagtagaactcaaagtcatccctctgctcacctgagacagatgcatatctgactgcttcctctgccctactgtttacattagcatatgtaaaaatgcagattcactgagccagacatggcataagtggctattcatctactcccctgccttatgtaaactgtgtattcagtgaaaggctgagcaaagactcagaaagatgcaaccatttgtctcttatctacccagacatttaaaaaatttttcctcttcccccagtatccatccttccccttttaaatattgaagccctcaaaatctttggagaatggcacagtttcctaggcgcatgtccttaaccttggcaaaataaactttctaaattgattgagacctgtctcagatacttttagttaacaatgacaaaaagtcttagggcagccacggttaaagacacaattgactaggagttttggttatttctgtggcatacaacaattttacataacagttataattactgatagcacacaataagtcatgtcagaattacatgagtttcccataattttggagcatacatcaataacacattcatacaaataaaatccaaagaaagccaaacactgttttatatttgacagctttctgtatgattttaatataccaaataagccaaatatttcattttgaacttatggaacttaacatctaaaaggattaatcaggtcagaaaaagacataatttagaatttgattttggaaagtttgtcaaatatcaaagatttaaagcacttgatattataaaataaaatcccaggacaccacaagtcatttatttagtcaaatcgatgactcaaagatttttaaaagacaaaaacctttactcattgatagcgggaagacagctttccaaacaatgtcttttttttctcccttctttttcctgtagcgtatttaaaagcgaagaaaaatctttcattgtcttttaatattatgtgaaaatgttgttcaagagagaaagctaaattttacttttgcattaatgtactattaacgtcaaacccaattattaataaaaccttatagacaaatctatacaatcttaatgtttcaccatgaggtaagattctcataaaccttttacaagattttttctttttctttttctttttttaaagaagagaagttccaaggaaaactgttgtgcttttatttcaatgttcgatttattgaaaaaactgaataataccccctttaactttagccagtatgttcacacatataatttcttttatgagattaacctttcacaaccatccacaacttgctgaaacctcagctttatcctatctaaattttacagtccttttttcttttttcttttttcttttctctttttgagacagaattgcttcgttgcccaggctgcagtacaatggtgtgatctcggctcactgcaaattctgtatcctggattcaagagattctcgtgcctcagcctcctgagtagctgggattataggcctgcgccaccatgcttggctaatttttgtatttttagtagagatatggttttgccatgttgcccaggctggtctcgaactcctggactcaaatgatcaagtaacctgcctcagcctctcaaagtgttgggatttataggtgtgagccgctgtgcccggccaaaacaatcctttaaccctctaaactaggccaaaaaacccacattcccatgccatcttgtaatcttttgccaaaaacattgtactttccttacacaccttgtatgcatatgtcccagtgttaactcttagcaacttttatttttggtgaaaaacttcacaagtaccgagtgtggcacctaggacagcaggcagtagtgcagataaggtgtgactctttctagcatagccagggggcatggctaccctcatatatccccaggccttccctagactctaatggttccaaaagccacagaagcagtttatgtagtttagtaaacacagtatctgaccttcctaacttagaccaaatgtttaaattttgaagacatttttattttaccaataatctttaaaactatctttatctcccaaagattaaagtcatgggaactaaaaggcattaaaatttctactttcctgagaaatatttaagtgcttatttttctttaaaccaattaattagagatcttttatataaacattatatacacaacacatataaatatgcacacagatacacagatagaagagctttttttttttttttttttttttttttttaaagacagagtctcactccgtcacctaggctggagtggagtgccatgatcttggctcactacagcctcaacctcccaggttcaagcaattctcgtgcttcagcttcccgagtagctgggactacaggcgcccgccaccacgtccagctaatttttttatttttagtagagatggggttttgccacgtttcccaggctggtctcgaactcctgtcctcaagtgatccacccacctcggccccccaaagtgctgggattacaggcatgagccacttggcccagtttttaagttttttaactggattgctagcttcgggttggagccctttgaggaacagggctaggaaagcatgcagcttccaagaagatgagtctctgatccaaacatggaaagaactgagtattccccatagctgccattagccatccctaaaagtatattttccaccaagttattacataccgagaccaaaagctctcccaggtgaaaccaatgagccttaactaaagttacgacttaatcatgggcataggaggtattttcaaagaggtggtgagcagtttttataagatctggaatctccaaaggtagctctgagaaaggaaaattcaagacaggaaatctgatgggccggcttgaatagtgggcttataggggtcccaagtccacattctatcctgtggtacccctctcttcatgacagaacaacacagaaagacaaattcatgacacaaggtacaccagattcactacagcctaagactagcctcacaaatcatttttcctattaatcaaaaccttgcagaggagacagacactattttttttaaccatttattcaaccagtttgcacacagagagaggccagaagcttgactggtaagaaattttttatttttatttttttttagacagggtatctctctgccacctagcctggagtgcagtggcaagatctctgctcactgcaacctccacctcccaggtccaagtgatcctcccatctcagccctccgattagctgggactgcaggcatataccaccacacccaactaatttttgtgggtttttttggtagagataggggtttcaccatgttgcccaggctggtctcgaactcccaacctcaggtgatcctcccacctcagcctcccaaagtgcttggattacaggcatgagtcactgcacctggtctctgactggtaagaaattcttacccttttgccagcatgccaagtttctaggttccctttctctgtatgactttgatggccctgcttgctgtgtcatagctatgggggccaagccatgtgacaaaagaaaatcatctttttctgtttcatggaaccataagcaaaagcctctcaattttgcaagatgctgcccaaaaggctgcatggagaaatcgaattaatgttttttcattctggctggagcaaaatacatgtgacaaaacagccaccccgctgggcaccaaatatcagcctggcaaggctcaaaattgcccctgttggcccctgtcatctttgatctactcaaagtggggtggaaggacctccaaaccaggagtttcaatatgtggtctctgggcaagatggaagagtggacagtcaccctgagtgacagaaaagatagaaaagggaaaggaaaggaagacagacagaggaaactggagggagaaaagcattgcctgtagcagagaaagggagatgagaagcaccaggaggccatagaaccatccaccatcacagcaacactgaaacaaaagttcaggcaactgcttgtcagtaacgaagggatcttttccaggagtcctgtcagctctcaattttcccctttgatggaggaaaaaaacccgcagtcatcagcaaagaacgcaaggtggattaatccaaagagaatagctgttagcatcccatagtgccaaatccattttttttttttttttttgagacagtctcactctgtcgccaaggctggagtgcagtagcactatctcggctcactgcaacctccacctcctgggttcaagtgattctcctacctcagctttcccagtagctgggattacaggtgcacaccaccacgcccagctaatttttgtatttttagtagagacggggtttcatgatgttggccaggctggtatctaactcctgacctcaagtgatctacctgcctcagcctcccaaagtactgggattacaggcgtgagccaccgcgcccggccactagatccatttttaactaagaggggccttactgagggggacctctaaccccctatgtcttaggggggaatctaacccttcgaagttgggcttctaacccaaatttttgccccttaaccgggataaaagctacccactacttacccaaagtcggccaattagtgctgcacagatgattttcctttgggccaagggtctctctggtaatgtcttttcgtggtttgccaggaagatgttcctggaaaggggtcccaatacagaccccaagagagggttcttggatctcacacaagaaagaattctgggtgtgtccacagagtacagtgaaggcaagcttattagagaagtaaagaaacagaagaatggttattcaagaggcatagcagcccagagtgctgcgttggctgtttttatggttatttcttgatcgtatgctaaacaacgggtggattattcatgagttttctggaaaaggggaagaaattcttgaaactgaggcagtctatataactttcagacgttgccatggtattgtaaactgtcacggcagtggtgggagtgtcttttagcatgctaatccattataattagcatataatgagcaatgaagagattccagaggtcactttacttgccatcttggttttggcaagttttgattggtttctttattgcatcctattttatcacttgagtctttgtgacctatatcttgtgcggatctcctgttctgtgactaagaatgcctaacctgggaatgcagtccggaaggtctcagcctcattttacccagctcctattcaaaagaatagttgctctggttccagcacctctgacacatttgctaaatggttaaatgtcataaattgcctatttaatgtgataattgttcaacttacctgctttggagcaaagggctgaggaagtggagttagctatgccccctagctatgctgagaagagtcagacctcatctgcacttctcagcaggcgttctaggcgccacacctggtacataaatagaacctcttacttgctaggtttttcaccaagaataaaagtaactaagaggtaatattataacatatgtaattgagagtactggagaaacagtttcacatgcaaggtatgtaaggaaagtagcatgtgtttttggtaaagaagatatgggaatgtaggttttttggcctaatttagagatttaaaggattgttttaagtttgataggataaagcgaaagttttgagtaagttgtgaaagattaatcttataaaacaaattctatgtgtgaatatattggctaaagttaaagggatattattccatttttccataaattgaacattgaaataaaaccacaacagggttttcttagggcattgatttgatccttctttttttgacacagagtctcgctctgttgcccaggctggaatacagtggtacaatctgggctcactacaacctccatcgcccaggttcaagcgattctcatgcctcagcctcccaagcagctgggattacaagtgtgtaccaccatgtccggctaatttttgtatttttagtagagacggggtttcaccatgttggtcaggctggtctcaaactcctgatctcaagtgatccacccacctcagtctcccaaagtgctgggattacaggcatgaaccatcgtgtctggctgatttgattttaacagaaaattgtaaagggttataaaaggtttacgagaatcttaccttatggtcaaactaaatgaaattaaataaatttgtctatagcttttattaagaattgggtttgacattaatagtacactaatgcaaaggtgaaatttggctttctctcttgaacaaaattttcatgtaatattaaaagataatgaaagatttttccttgccttttgaataaactacaggaaaaagaagggaaattaaaaagactttttttttggaaacctacctcttcctctatcaatgagtaaaggtgtttgtctttttaaaatctttgagttatcattttggctaaataaatgacttatgttgacctaggattttattttataatatcagtattttaaatctttgatacttgacaaactttccaaaatcaaattctaaattatgtctttttttgacctgattaatccttttagttattaagtcctataaaatccaaaattaacatatttggaccaggtacagtggctcatgcctataatcccagcactttgggaggccaaggccagtggattgcttcaggccagtagtttgagacgagcctggccaacatggcaaaaccccatctctactaaaaatacaaaataaataaaatacaaaatacaaaataaataaaaatacacagccagtcatggtggtgtgtgcttatagtcccagatactcaggaggctgaggcacaagaatcacttgaacatgggaggtgaagattgcaatgagctgggattatgtactgcattccagcctggggcacagagtgagactgcgtcactgcactccagcctgggggacagagtgagactgtctcaaaaaatcaaaacaaaacatatttgacctatgtggtatattaaaatcatactggaagcattgtcaaatatgaaatggtgtttggctttctttgggatttatttgtataagtatgttattgatacgtagtgcaaaattatgggaaactcctatagttctgatatgagttagtgtaagttatcagtaataataatttttaggtaaaattgttgtataccacagaagtgaccaaatttccttgtcaattgtgtctttgaatatggctcccttaagacctgttgtcattcacagacaattactgtcttgttttgatcctgttcaaaagatgttttataattagctataggactctgactcttaaatccaagtctctgctaagttttgaaagtgtgccattaaagtagaggggagaaatttccaagactctcttggaaaactaatgtgttcataaatatcaagcaaaacaggaattaattgcatacactaaattaaaaaaagaccaaaataatcttcttacaactttttgcttcaaacattgctgatcctttctgttttgtttttcagagtcaagaaaactcttcttttgaattatttacagcttttaacaattgagtaaagtatactcctacgagcaaaatttggagcatatttctttctctctacctgatttttccagaatctggaaactatttgtgagtattcatgagtgttttttgtttgtttgtttggtgggtttttgtttgtttgtttgtttggccagggcctttctctctcatccaggctgaagttcagtggcatgatcacaatcatcacaggtcactacagcctcagcctcacaggctcaagtgatccactcacctcagcctcccaagtatctggggctacaattgtgtgtcaccacgcccagctaatttttttttttttttttgtagagatgaggtctcactatgttggccaaggtggtctcaaactccggggcactagtggtcctcccacatcagcctcccaaagtgctgggattgcaggtgtgagccaccacatctggcctagtattcttaacttatggcaatatagctatttgcataagtgcaataagaatctgtttttcttttgtataaggttattttatctggcgtgctttcaaatacaaacagactgctttaaggaatcaaagttgacatttcaagccaataaaagccccttaggaaaactgccatcataccttgtctacacaatccctgtacagggtttctgacctgtggcaagtaaagaatgtcactttctgacaggcccagaagcctcaagttatcttgggacctcaagaagagagaaatttaccaactcatataggtatttgcaggcacagattaatcagtggctgggctcaaggccttaaaaactctaatctaagagtccttacagaacaaagttacatcaaagccaattttatttttctattatgattattattattattgagatggagttttgctcttgttgcccaggcttgagtgcaatggtgtgatatctgctcactgcaacctccgcctcctgggttcaagtgactctcctgcctcagcttcctgagtagctgggattacaagcatgcaccaccacgcccagctaattttgtatttttagtagagacagggtttctccatgttggtcaggctggtcttgaactcctgacctaaggtgatctgcctgcctcagcctcccaaagtgctgggattacaggcatgagccaccgtgcctggcaatcaaagccaaatttaaaagaagcctatatagcaaataattattcttgctgcacattatgccgataatatgccaagtatcataagattaaagcctgttttgcaaacaaatcagtcctatcatgatttgttttaatttaataaaaatggaagatgagagagagaaaaaattgtgtatcaaaaactatggtataccttgatatggtttggctgtgtccccacccaaatctcatcttgaattcccacacattgtgggagggacctggtgagagggaattgaatcatgggggcaggcctttcccatgctgttctcatgatagtgaataagtctcatgaaagctgatagttttataagggggagtttccctgcacaagctctctctttgcctgctgccattcatgtaagacgtgacttgcagctccttgccttccatcatgattgtgaggcctttccagccatgtggaactgtaagtccattaaaactctctttcttttgtaaattgtccagtcttggctatgtccttatcagcagtgtgaaaacggactaatacatatctgttattagagtctggtctcatccattgtttttgagttttttctgctttttaaattttattttttggacagaatctcactttgtcacccaggctggagtgcagcgacatgatctcggctcactgcaacctccacctcctgggttcaagtgattctcatgccttgacctcccgagtagctgggattacagacacccaccaccacacccaggtaatttttgtatttttagtacagatggggtttcgccatgttggctactctggtcttgaactcctggcctcaagtgatccaccttcctcagcctcccaaagtgttagaattacaggcgtgagccatcacacctgaacttttctgctatttagactgaccctgattatttttgtgaaccaatgagtgatctctgtctgctgctcagcagaaacaggaggaatgggcaatgtaaaaatttgcatcaggtttataattctgggcatgcattgggattggctagcaactccatatcagcttggttccaacaattgcccagttcatggaaagccttcctatttagtttacttggaattattttatctattttgttttactattatggaatatatggctgttgtactctttgtgtaggaatgcaggataaacttactcaacattttctttttttttttttttaagatggagttttgctcttgttgctcaggctggagtgcaatggtacaatcttggctcaccacaacctccgcctcccatgttcaagcgattctcctgcctcagtctctcgagcagctgggattacagacatgagccaccacacctggctaattttgtattttcagtagagacagggtttctctatgttggtcaggctggtcttgaactcctgacctcaggtgatctgcctgccttggcctcccaaagcactgggattacaggcatgagccactgtgcctggccaacattttcttaaattgaatacttattaatcttccagataccacctttttgtcagaactcagagttatgaatggccctcaccatactaatgctttctgactgagctcctctctaccctgaataaaagagaccctaataattaggcaggaatatcaccacccctattcagcccaaagaagttactgatgatggatcctcctccctctacaacacttagtcctcttgtaaaagggaggaagaaatgtgtcagaggtgttggaacaagagtgactccatcttgaacaggggctaggtaaaataaggctgagacctgctgggctgcattctcaggaggttgtggattcttagtcacaggatgggataggaggttggcacaagatacaggtcataaagaacccactgataaaacagcatgcagtaaagaaaccagcccaaacccattaaatccaagatggcaacaaaagtgacctctggccatcctcactgctcattatgctaatataatgcattagcatgctaaaagacactcctcccaccagcactatgacagtatacaaatgccatggcaacgtctagaagttaccctatgtggtctaaaatggggaggaaacattagtttgctggggtctggatcagaacccctttctggaaacactgtagataacatcactattgtaaaacctacaattggtgttttggagatctttcagactgaccccacctggacccatgactcatgagtcagctgatcctgtggctccatgcagaggtggactcaactgatgaagactgttttccacacccctatgatttcatcctcaaccaatcagtaacacccattcccaagccccctgctcaccaaattttccacaaaacccttaacatcatagcctttagggacaactgctttcacaggctggcattgagtgcctgcagtttttccaggcacatagtgcaagttgtcagtggatctaccgttctgggatctggaggatggtagccctcttctcacagctcaactaggcaatgctccagtggggactctgtgtagggagctccaaccccacatttcccctctgcattgccctaatagaggcccatgagggctccacccctgcagcagacttctgcctggatatccaagcatttccatacatcctctgaaatctaggcggagctcaactgttgtcttctgtgcacgtacaggcccaataccacatggaagctgccaagacttggggcttgcaccctctgaagcaacagcctggactgtaccttggtccctattagccatggctggagctggagcagctgggacgtgtggcaccatgtcctgaggctgcacagagcagaagggccctgggcctggcctggaaaatcatttttccctcctaggcctccaggcctgtgatgagaggggctgccatgaagatttctgaaatgccctggagatatttgcgccattgtcttggctattaacattcagcttctctttacttatgcaaatttatgcagcccaggggcttgaatttctccccagcaaatgggtttttcttttctaccacatggtcaggctgcaaactttccaaacttttttttttttgagatggagtttcattctgttgcccaggctggagtgcagtggtgcaatctcagctcactgcaacctcctctttccaggttcaagcaattctcctgcttcagcctcctgagtaactgggactacaggtgcgcaccactgcgcccagctaatttttgtatttttttttttttcagaggcagggtttcaccttgttggccaggctggtctcgaactcctgacctcgtgatctgcccacttcagccttccaaagtgctgggattacaggcatgaacctctgcacctggccccaactttccaaacttttatactctgcttcccttttaaatataaattccaatttcagattatccctttgtaaatgcatgtgactgtatgccattaggagtagccagcccacctcttgaacactttgctgcttagcaatttcttacgccagataccctaaatcatatttgtcaaggtcaaaattccacacatccttagggcaggagtaaaataccacaagtctctttgctaaagcatagcgagagtgacctttactccagttcccaataagttccttatctccatctgagaccatctcagagtggatttcattgtccatatcactatcaacattttggtcaaaaccattcaacaagtctctaggaagttccaaactttcccacatcttcctgtcttcttcttgggtttgtttttgttttttgagacagagtctcactctgttgcccaggcgggagtgcagtggcatgatctcagcatactgcaacctctgcctcccaagttcaagcaatttttatgcctcaacctcctgagtagctgggattacaggcatgcacctccatggccagatatttttttaatttctagtagagacatggtttcaccatgttggccaggctggtcttgaactcctgagctcaagcagttctcacaccttggcctcccaaagtgctgggattgcaggcatgagccaccatgtccaaccatcttcttgtcttcttctgagccctccaaatttttccaacctctgcccattacccagttccaaagtcacttccatattttcaggtatctttatagcagtaccctactcctggtaccaattttctgtattagccagatttaacactgctataaacacctacttgaggctggccatggtggctcatgcctgtaatcccagcactgtgggaggctgaggtgggcggatcatgaggtcaggagttcaagaccagcctggccaacatagtgaaaccccatctctactaaaaacacaaaaattagctgggcatagtggtgggtggctgtagttccagctactcgggaggctgaggcaggagaatcacttgaactcagaagatggaggttgcagtgagccaagattgcacccctgcactccagcttgggcaacagagtgagacttcgtctcaaaaaaaaaaaaaaaaaacagaaaggactacttgagactgggtaatttatgaagaaagaggtttaattgagtcacagttttgcatggctggggaagcctcaggaaacttatgattgtgccagaagacaaaggggaagcaagcaccttcttcacaaggcggcaggagagagagaggcagggggaactgccacactgccacacacttttaaaccattggatctcatgagaactcactatcacaagaaaagcatgggggaaccacccccatgatcaaatcacctcccaccagatccctccttcaacacttggggattacaattcgagatgagatttaggcagggacacagagcgaaatcatatcattgggtatataaaattttcaaacagcatcatcatttgagctaaaacatttttttttttttttttttttttgagacggagtcttgctctgtcgcccaggctggagtgcagtggcgcaatcttggctcactgcaacctccgcctcccaggttcacgccgttctcctgcctcagcctcccgagtagctgggactacaggcgcctgccaccatgcccagctaatttttttgtatttttagtagagacagggtttcaccatgttagccaggatggtctcgatctcctgaccttatgacccgcctacctcggcctcccaaagtgctggaattacaggcatgagccactgcgcccagcaagctagaacatttttaaattttgtaattgttattgttcatcaggagttgaggatttaacaccatgaataatactattagtatgaagagaaattccctttttatggagaacatacgttacccagtggccatcaatttgaaagaacttattggaaaagttcaaggcccatgttaagtcatgccaggattcaaaagaccacaccatccacttctttttcttttcttttttttttttgagacagagtttcactattgtcgcccaggctggtgtgcagtggcgcaatcttagctcactgcaacctccgcctcccgggttcaattgattctcctgcctcagcctctaaagtaggtgggattacaggcatgtgccaccacgcccggctaattttgtatttttagtagagacaggttttctccatgtgggtgaggctggtctcgactcccgacctcaggtgatctgcctgcctcggcctcccagtgtgctgggattacagatgtgagcccggccatccatttctaaacatcaacaaaaccttggaaaatatgagaatggtgtgattaacaatttgtatgaaaacttctatctcttgataagtataagtagttttgtaatataggtcagttagagacaaagtgggggcagtggtgaaatctatttttaaatcttttatttatgtcttgagttatatatttatgttctcctactgattgttgttgttttttaatagagacagagtcttgttttgttgcccaggctggtctaaaaatcctggcttcaaggagtcctccagcctcagcctgccaaaggggtgagattacaggcatgagccaccttgcctggacagtaaatattttttataatacttctgcatttctcattagaagtttgtgaggattaaatgagattatcagtatgaatctcttagcacagcaaaaaggaatatagcaactttattgtgtgttactatatttaccgtcagtcttatcaatatggtaaattactgcagacctcaacaacatggatttggcatgattttgagaaatgtgtcaggtctatggggaaaatgttttctttttcaatttaagacttcacctctggtttattatgccacttttttttttgtagttgttgttgttttggttttggttttttaagacagtgtcttgctctgttgcccaggctggagtgcagtggcacaatcacagctcactgcagccctgatttgtcaggctcaagcaatcctcctgccatggtctcccaagtagctgggactacaggcacgtgccaccaagcccagttaattgtttcaattttttcaatttttttcaattttttttttttttttgtagagatggggtctcactctactacccaggctgatctcacactcctaggctcaaacgatactcctgcctcctactcagcctcccaaagtgcttggattacaggcatgagcccccacgcccagctgattaatattattccacttttgacaaatccgtcttccacggccttgctaaagcgctcctagcaatgtttgctaacagctgtaagcggtatttcccttggtttcctctgctgtctttggatcagatctgcggtcagcaagcttcctgcttgcagcagagaattctagacatgtcagctgttctgaaaggtccccagtcctcccaggcacgatggatctcaggggccccatccctccctctgcccaggctagcatggaggacacgctggtggggaaagtgtcttaactgtcatgcttacaaaacctccaattccctttagcagaaattctagcactgagagttatcccatcagagattaaacttgtagggttctttccatcctcgcttctttgctgagagaaattgccactgatgtcacagtatgaaaagcaccatgtcatctcttttagaagggaagtgcctgagaagtaatttttactgtaagagggaataaaggccttttgtgaactgagggttacagatgatttgctaccaggcagtggtggacaggtagggaggaagtgggatgagggcagcaggcccctggtggtggcagggtgtggcccctggggtggctgaccaccaggaggtgggccctggcgagcctggagtgagtcaacgctggggtggggaggatgtcctaggagaatctggacatgggcagagaactggctttcctacagagatgacacctgtctttggttttttttgttttttgtttgttttgttttgttttgagacagggtctcactctgtcacccaggctggaatggaatggcgtgatctcagctcactgcaacctctgcctcccaggttcaagtgattctcatgcctcagcctcccaagtagctgggattacaggcatgcaccacgcccagctaattttttatattatttgtagaggtggggtttcaccatgttggccaggctgatctcaaactcctgacctcagatgattcacacacctcagcctcccaaagtactgggattacaggcttgagccacctcgcctggcctgacgacacctgtctacaggaatgtgcaggacctacctacagggttaaccctgtgtggagacaagaatcagtaacccaggtgaccctgcctgatcatagggcttcctttcacttgggaagcccctcccatcatttcccacctcccacttcagactgatgagactggaatatgtggcgttactttgtgtacacttcagagagccaggagaattctggatcctgtagaagtgaaccaaccacaagctactccacattgttaatttagggattctgagacctcaagtcaagaaagttctgatcgtgggcactgggcagacagagacagtggaaaagaattgggagcccaggctatgacttcagacagatgaggaagttttgtttgttttatttttatttacttattctttatttttattttttgagacagggtctcgctcagctgcccaggctggcatgcagtggcaagtcatagctcactgcacccttgacctcccagactcaagtgatcctcctgcttcagtttcctgagtagctgggactacaggcgcacaccaccacacccggctaatttttatttttagcagagacaaggtctcagtatgttccccaggcgagtcttaaactcctgagctcaaatgattctcccgtcttggcctcccaaagtgctgggattacaggtgtgagccgctgtacccgacccacacagggtttgaatcccagccatgctacttcctagctgattttccccaaatgtataatggggacaataaccctctagagaattacaggagatcatgaggaaaaagcatttcacacaaggcctagtcaatacacaacagctgccactatgactatgaaccgaaattcatgataaactgcttctaacaatgcatgctatacccaacaaagaatgtatgcaggggacggggtgctaaagacattcctgggggcagggacaagcggaaatgaattatattcatgcctattggatattttctttggattttgtatgctgtttcgatttttataattttttttcttaaggaaaaaaacacatatttttttcttaaggaaatagacactggccaggcgtggtggctcacgcctgtaatcctagcactttgggaggccgaggcagggggatcacctgaggtcaggagttcgaaaccagcctggccaacatggtgaaaccccatctcaattaaaaataagaaataagccaggcatggtagtgcatgcctgtaatcccagttacttgggaggctgaggcaggaaaatcgcttgaactggggaggcggggaggcggaggttgcagtaggccgagattacactattccactccagcctgggcgacaaaagtgaaactctgtctcaaaaaaaaaaaaatagacactgttgttgcaagcctatgggttgcctgagggcaagtatgggctccaggtaggtcttttgaggaaaggatcttgtttttatctttcatgtaaaagttactttatctttctcaatacctcagtggttttgaacccaagcctctgggaaatgtcccaacctcctgtcctcactcagtgcaccatactaccaggcttagaggaggctctttctccttatggaggaccaaggaaaggtgttgtcaaggtctgccattatcccatctttcctccttctccataataggaatattaatgcagaaagaaataattgaaagaggagcggccaggcgcagtggctcatgcctgtgatcccagcactttgggaggccaaggagggcggatcacctgaggagttcgagaacagcctggccaacatggtgaaaccccgtctctactaaaaatacaaaaattagccaggcgtggtggcaggcacctgtagtcccagctacttgggaggctgaggcaggagaattgcttgaacccaggaggcagaggttatagtgagccaagatcatgccgttgcactctagcttgggggacaagagcaagatttcatctcgaaaaaaaagaaagaggagctagaataagaaaataaaagctggagagaatgtggagaaataggaacgcttttacactgttggtgggagtgtaaattagttcaaccattgtggaagtcagtgtggtgattcttcaaggatctagaactagaaatatcatttgactcagcaatcccattactgggtatatacccaaaggattataaatcatgttactgtaaagacatatgcacacgtatgtttattgtggcactattcacaatagcaaagacttggaacccacccaaatgtccatcaatgatagactggattaagaaaatgtggcacatatacaccatggaatactatgcagccataaagaaggatgagttcatgtcctttgcagggacatggatgaagctggaaaccatcattctcagcaaactatcacaaggacagaaaaccaaacaccacatgttctcactcataggtgggaattgaacaatgagatcacttggatacagggaggggaacatcacacactggggcatgtcggggggttgggggttagggaagggatagcattaggagaaatacctaatgtaaatgatgagtttatgggtgcagcaaaccaacatggcacatgtatacctatgtatcaaacctgcacattgtgcacatgtaccctagaacttaaagtataataataaaaaaaataaaaataacattctactctccagatatagctattgttaacattttgagaaaatatccttccagatagtttttctctttctttctttcttcctttcctttcttttccttttttaatttagagacaaagtctcattatgagtctcccaaagtgctgagaatacaggcatgagccactgtgcccggcctccagatagtttttctatgtatacaaattatgcactttcttatttagaaaaatgatttatgttattacaactgttaataataccttttctcttttcttaagtatattgtgattctcttaccacatcatgaaatgttcttctacatcaccattaaaaattcttttttttttttttttgagacagtgtctttcaaaagtgcagttctgaatcaaggcagccttgaagtcttgttattatggcaagccctccagtgccaggagaactgaggtaggagtaaactcagatcagcctttgaaatagaatgtgtgaggccaggtgcagtggctcatgcctgtagtctcagcactttgggagactgaggtgggtagatcacttgagatcaggaatttgagaccagcctggtcaacatggcgaaacctcatctctagtaaaaattaaaaaaattagctgggcgtggtggcaagtgcctgtaatcccagctacttgggaacctgggaactgtggaggttgcagtggcccgagatggcgccactgcagctattactccagtttgaaaatactagaagttgccaatatatattttttccattgccagacttgtctgcaatttgtactggatctgatagagaaaccatttccatgggtctatatgaaaatgtggagccgggggtagtggctcacgcctgtaatcccacaacttcgggaggccgaggcaggcagatcacctgaggtcaggagttcgagaccagcctggccaatggggtgaaatcccgtctctactaaaaatacacaatttagccaggtgtggtggcacgtacctgtaatcccagttacttgggagggtgaggcaggagaatcccttgaacccaggaggtggaggtttcagtgagccgagatagcgccactgcactccagcctgggcaacagagcgagactccatctcaaaaaaaaaaaaaaaaaaagagagagaaagaaaatgtgggtgcggggaatgattctatggttgtctgttcttttccagctggccagcagtggtagccaaaaagtgacaggatgctgatgaaaaacattgcagacgtgaagaaaagaaaaagttgatggaattttgcacatgtatctgacagttcacccatccaaacttttataaagtgctgtaaagttgttgtagtaagggtggggcatggtggttcatgcttgtaatcctagcacttttggaggccacacgcaggagaatcgcttgagcccaggagttcaaaaccagcctgggcaatatagtgagacttcatctctataaaaaagttaaaaacctagtagtgtatggtggtttgtgcctgtggtcccagctactagagaggctgaggtggaaagatagtttgattctggtaagtggagattgcagtgagccaagatggtgccactgtgctctagcttgggagacagagcaagattcagtatcaaacctcctagctagaggatgctagctaggtgacgctgagtcaataaggaaggatttggttacatcttgggacctaaggtacagagatgaatgtcccagctcaaggctgccccagccattcaactccttgcttcctctcttggtggacctgtcaattcttgcaagtgtcaaccagctgtcttgcccacctagccctatagtcatacctttctatccttttggtgatctccactccatcaagaagtggctctgcacattctatttcaactgactttttttttttttttttgagacagagttttgctctatcacccaggctggagtgcagtggtgcaatcttggctcactgcaacctccacctcccgggttcaaacgattcttctgcctcagcccctcaagtagctggaattataggcacgcatcaccacacccagttaagttttttgtatttttactagtgatgggatttcgctgtgttggccaggctggtgtcaaactcctgacctcgggtgatccgcctgcctcagccttccgaagtgctaggattacaggcatgagccaccgcacccagcctgcacgttctatttcaaaggctgatctaaggtaactcctacttcagatctcctggcactggagggcttgccgtaatatcaagtccccaaggctcccttgattcagaaatcactgaggcagcagcaccttgtacagatatttctcagccttcactgtgcgtaagaattgctcagggcccttgtttaaaaaaaaaaaaatcagcgtcctggacttgaaacccagtaagtctggagtggggtctaggaatcaacgtttaacaaaagcaggcatttttggccaggcacagtagctcacacctgtaatcccagcactttgggaggctgaggcgggaggatcacttgagctcaggagtttaacaccagcctgggcaactagacccctgtctttacaaataaaaataattagccagtcctgatggtgcacacctgtggtcccagctactcaggagcctgaggtgggacgagcacttgagcccaggagtttgaggctgcaatgagctatgatcacagcactccactccaacctgggtgacagagtgaggccagtctcaaaaaaaaaaagcaggcatttttgatacaatatttgtatgtatctgcttaagacagtcggtttgcttccaaagactaaatcaaacttccaccaaactccttttggcatagactgagtccagagcaaggagatcagatgggtttacatagacaatgtaacagtcagatttacctcttctctttcccagccagcatgggacgatgtgggggtgtgggggggtggggggggcgggggagtggcaatctaccaaatatctctcttcttacaggaactcacagaggaagacagattggtcgaacaaaccagtattatgcaaacctcatccaaaccctctgatttccttaacttggctaagaaaaagaggaagttctccgagttactcaccactgtggttctactatgccttctgaccccgtcttggacttcaactgggagaatgtggagccatttgaacaggctcctcttctggagcatattttcttctgtcacttgtaagccccccttatcattctgaggctcgaacctccaagccaacgtgtcatgtggaaagtgagctttatcgtgttccttttctgtttcaggtagaaaagctgtattggattgtgaggcaatgaaaacaaatggtaagtttcatttacttctttcttattgaaaccattttcactgaagtggtgagacagtctgattgcaacataagcgtccattcaaaagtgtttctgagcttttatgaacaaccaaagaacagtcttttcaattatctatcatttaaaataaaatgattttagggaggggattgcagcatttttttctgagactcagtgagaaaaataatgaaatttgttttcacaatgaaagttttctaactttccttgttattgttgttttatggttgttgtgttttaactagaaagccaacacacaggctgggtgtggtgcctccggcctgtaatcgcagcactttggaaggctaatggggtaggattgcttgagctcaggagtttgagaccagcctgaacaacatagtgatacctcgtttcttaaaaaaataaaacaaaataaaaaaacccacagaattattgtgaaataattcaagcaacactagaaatatacattgggaagtggtctaacctctggttctactagttactagccagcagcctgagctcatgacatacccagtttgaccttaatttctttctttctttctttctttctttttttttttgagatggagtctcagtctgtcgcccaggctggagtcagtggtgcaatctcggctcactgcaacctctgcctcccaggttcaagtgattctcctgcctcagcctcccgagtagctgggactacaggcgtgtgccaccaagcctggctaatgttttgtattttttgtagagacggggtttcacatcgttagccaggatggtctcgatctcctgacctcgtgatccgcccaccttggcctcccaaagtgctgggattacaggcgtgagacactgtaatttatttcatctgtgaagtgggctaataaaagcacctacctggtaggctagtgtgcagatcaaatgagacaatccctgctcctcgtcacagtgccaggcatatggtaaaccatccgtaagtgatagccaaggtggtggttgttactgtataaaatgtaaaagttctgttacaatcctcctccaattcttctccccttcctatccagaagcagccgttatcaacagtcactttatattcgttatctttttttgtttgtttgtttttgagacagagtttcactcttgttgcccaggctggagtacagtggcacaatctcggctcactgcaacctccgcctcctgggttcaagggatcctcctgcctcagcctcccgagtagctgggattacaggcacgtgccaccatgcctgggtaatttttgtattgttttttggtagagacggggtgtcatcatgttggccaggctgttcttgaactcttgacctcgtgatcctcctgcctctgcctcccaaagtgctggggttacaggcatgagctaccacaccagccttagctcctctttttcaacagctgcatggtattttaagactcagccatgattcgtttaaccatccttatttattgccctgctttttgggggcaatataaacaatgctacaataaacatccttgtacacaacgtcctttgtggatgcatgagagcttgaaagcatctctgtagaatgaaattctagaattgaaattgcaaggtcatagggcatacacatttaaattgttacagaccctgctaagttgccctcccaacaaggctgatcgtatcctatcagtcaccaacggtgggtgagtttccccacccactccccagtggtggatataatcacttttacttttaaattttatttagggtttttttttttctttctttctttgagacagagtctctgctctgtcgcccaggctggagtgcagtggtgcgatcttagctttccgcagcctcgaccttccaagctcaattgatcctcccacctcagcctcctgagtagtgccatacaggtacgcaccatcatgcccagctaatttttgtatttttagtagagacagggtttcaccatttgcccaggctggtctcgaactcctggactcaagagatctgcctgcctcagcctcccaaattgctgggattacaggcatgagccaccatgcctggccaatcatttttaaactttgtaccaatctgatgagtgaaaaatgatatctcagtgttgttttaatttgcagttgcctcattacttgtgaagttgagcatctttttcatgtttactggccacaaaagctctagcattcctagataaaaaaaacttagggatggctatttggttggaaaggtagtttaggtcttgtcttaaagttgagtttatatggcggggcacagtgactcacacctgtaatcccggcactttgggaggctgaagcaggcagtcacttgaggtcaggagttcaagacgagcctggacaacatggtgaaaccctgtctctaccaaaactacaaaaattagctgggcatggtggtgtgtgcctatagttcagctactcaggaggctgaggcaggaggatcagttgagcctggaaggtggaggctgtggtgagtcaagatggtgccactgcgctccagcctgggcaacagagtgagactctgtctcaaaaaaaaaaaaaagttgagcttatataagactgagaaaatgttaattgtccagatcaaagagtgggaggagagtttactgcatttttaaaagcatttttgaagagtctaaatctgtcttccacccaagccatccattggtcccagctatgtttttttttttttttgttctgttttgttttttaaaaattagagacgaggtctcacttgttgcccaggctgttctcgaactcctgacctcaagtgaccctcccaccacagcctcccaaagtgctaggattataggcgtcaaccaccacacccaacttcaagaactttttatttattattatttttattttttgaggtagtctcactctgtcacccagcctggagtgcagtggcatgatcttggctcactgcaacctccgcctccctagttcaagcaattctcctgcctcagcctcctgagtagctgggattacaggtgcccaccaccatgccagctaatttttgtatttttagtagagacagggttttgccatgttgcccagactggtatcaaactcatggcctcaagtgatccacctgcctcggccgcccaaagtgctgggattacaggcgtgaaccaccttgcccggccaggatcttaagaaggactttttcttgtgtcattttgtttttcagaattcccttctccatgtttggactcaaagactaaggtggttatgaagggtcaaaatgtatctatgttttgttcccataagaacaaatcactgcagatcacctattcattgtttcgacgtaagacacacctgggaacccaggatggaaaaggtgaacctgcgatttttaacctaagcatcacagaagcccatgaatcaggcccctacaaatgcaaagcccaagttaccagctgttcaaaatacagtcgtgacttcagcttcacgattgtcggtaagtagagtgcctgttccttggagcccctataatttatagggtgctttctggttctatgaggggctctccatgatccttgtgaacacttaagaacctggaaagtatgttactgcgagctttattctttttttattttttatttatttttagacctggtcaacaggaagtatcttttaattttttaatttttgagatctctattcttttttttttttttgaaacagagtctcactcagttgcccaggctggagtacagtggtgaaatcatggtccactgcaaactccacctcctgggttcaaggcattctcctgcctcagcctcccaagtagctgggattacaggcacccatcaccacgcctggctaatttttgtatttttacttgagacgaggtttcaccatgttggtcaggctggtctcgaactcctgacctcaggtgatccgcctgcctcagcctcccaaaatgctgggattacagatgtaagccaccatgcccagtgagttctctattcttaatcattccgtttcaccttctctttcaaagactttcgaccatgtcagataatagtcttatatctttaggcaaaagtcttatatctcaacaataattgtggaggtcttttctagaaactttattctgtgattcccattgtgtgggcaaaaatcgctttttttttttttttttttttctgaagccttgggccccttggagagggtcttcaaagcctcacgcctttcccaccgcttccttagtgtcaggggccccatccgctagcactcttcctgcctagccacatctcactacttctgtgtttttctgtcccattttcctaccccaagcctgttactgcctagcattaagggcctcatccgtgaaggtgaccttgataatggactcctgtgggaggagagaaggcttctaggtaacacatgtatgttatacctggagtcttcaaagcgtagggaccctgacttcctgataactcttgagtggtcctctatgtctatgctatccagtacggtactgtttaaacttatttgtttattttgttttattttatttctttttttctttttttgagatggagtctcgccctgtcacccaggctggagtgcagtggtgcgatctcagctcacttcaacctccgcctttcgagttcaagcaattctcccacctcagcctcccgagtagctaggattacaggcatgcaccaccatgcccagctaatttttgtatttttaatagagatggggtttcaccatgttgaccaggctggtcttaactcctgacctcaggtgatccacccacctcagcctcccaaagtgctgggattacaggcgtgtgccactgctcctggccaacgtttatttatttaatagcctatgtcacccaggctggagtgcagaggctactcacaggcaatcaaagcccattgcagcctcaaactcctgttcttaagagatcctcccacctcagcatcctgaatagcttggattacaagcacgtgccataattaaaatcaagtcaattaaaattagatgaaataaaaaatttccctccacagtctcagttacatttcaaggctttgatagccacacctgtagctggtggctgccacattggacaacacagatgtagaccattcccatcatcacagaaagttctactgggtgacattgctgtagctcagtgattcttagctttttaggttataactgtcttaataatccaatgatagcaatgaatatcttctccagagaaatgctcataaaactacgtatacaaatttctgcataaggttttagagaatgctacggactccaggttagaaccaattatcttggccaggtgcgctgtctcacaggtgtaatcccagcactttgtgaggctgaggcgggaggatcacctgagcccaggagtttgagaccagcctgggaactatgtggagactgtgtgtctacaaaaagttaaaaaatatatatatgtagctgagcgtggtggcgtgcctatagtgccaactactcaggaggctgagttgggaggattgcctcagcccaggagttcaaggctgcagtgagctgtgattgcaccactgcactgcagcctgggtgacagagagagaccctgtctcaagaaaaaaaaaatcccaatgatctttggacataaactgagtatattccttgtgaaaggaaaaggaagaaggagggggaaaatccctgcaaacatggtactggaatacgatggatatgtgagggcaggaacacagctgatggtattctctagtggtcagactcctgctgcactcagcaataagcccatcagttcatatgttttttgtgcacgaccttcctgcaatttgttagggtaattacacagtctggtaataaaactatcttggtagattataaaactgtatcatcttcagttaggccagatcaataggcactacggagtacctactccatgcaagcaattgtactactgggtttttaatgaggcctaaaacatagtgttgtctccaacccagtaagggttgaaactatgagccataaacacaaattcattaatcactgattcactcatcaaaaaaaaattttttttttgagatggatcttgctctgtcactcaggctggagtgcagtggcaccatctcggctcactgcaagctctgcctcccgggttcacacaattctcctgcctcagcctcccgagtaggtgggactacaggcgcctgccaccacgcctggctaatttttttttttttgtatttttagtagagacggggtttcaccatgttagccaggatggtctcaatctcctgacctcgtgatctgcccacctcggcctcccaaagtgctcactcatcaaatgtttaaagagaacacagggccggctgcagtggctcacgcctgtaatcccagcactttgggaggttgagtgggggcagatcacttgaggtcagtagttcaagaccagtctggccaacatggtgaaaccctgtctgtactaaaaatacaaaaattagctaggcatggtggtgggcacctgtaatccccagctacttgggaggctgaggcaggagaattgcttgaacctgggaggtagaggttgcaatgagctgagatcgtggcactgcactccaggttgggtgacagagtgagactccgtctcaaaacagaaaagaaagtaaataaaaaaaaaattgtttttaagtgtggactcttgaagtcagtcccaactcggccatttactagctgtgtgaccttgggcaaatttctcaatctctctgaagcacagttggttcatctgtggaatgggcatgatactatccacactacaagactgtcgtgaaggtcaaatgagatcatgtgactggcacgcctggcacatgatagatacttaacagcttttcttcctttcctataatactgtcttattaatgcattatatatatatataataaaatgtatagctgggtttttctgttaggtcatagaataggctatgatctaacagagtgtagcagacccatttcctgttgagaatttctcttgaatctagttagcagggttacttcctgctctttggaggaagtgaaagataattgtgcagctgagttctataaataaaagtacagttggagaaaacgatatttttggggctgggcatggtggctcacacctgaaatcccggcactttgggaggctgaggtgggaaaatcacttgaagccaagagtttgagaccagcccgggcaacatagtgagactctgtctctacaaaacatttaaaaattagccagcagtgtgcacctgtagtcccagctacagaggctgaggcaggaggatcacttgagcctgggagtttgaggttacagtgagctataattgtgccacttcactccagcatggttgaaagagcaaaaccctgtctctgaataaataaatacattgaaaagaaaatgatatttttggattaaaaaaacccactgtaaatttacaaggattgagaataaaagcacttcttgggccgggtgtggtggctcctgcctgtaaccacagcactttgggaattcaaggtgggaggatcacttgaggccaggagttcaagaccaacctggccaacatggtaaggccctatgtctataaaaaataaacataaaaaagcacttctcagcttcatacttagaactggatcattgacaaaattatattcattattaacaataaatagattgtgaattctaggaagggcaagcttgcaccccaattcctcaaagcagagagatgccctccactctctggctttctcagcactcagctgagaacctcggctaacaacacactgcacggggttggccacatgcccattggcctttcccagtgggccgtgagcttcttgacttctcaggaagggggtcgttcatcttggttccacagcctggagtggagtaagggttccactcatatttgtggtctgagtgagcacacccagtctgtttatccttttcatgttcactttcattcttccagacccggtgacttccccagtgctgaacattatggtcattcaaacagaaacagaccgacatataacattacattgcctctcagtcaatggctcgctgcccatcaattacactttctttgaaaaccatgttgccatatcaccagctatttccaagtatgacagggagcctgctgaatttaacttaaccaagaagaatcctggagaagaggaagagtataggtgtgaagctaaaaacagattgcctaactatgcaacatacagtcaccctgtcaccatgccctcaacaggtaagagcaacctgagttctttcagccaggtctgaactcacttccagaaactgcagctgctcctctgcccacccatttcccaccatggccacctgaccttccaggtccttctgaaggtgcatttgtcaaggtagaaggatagaaggaaaactaggtcgtgtgcagtggctcacacctgtaatcccagcactttggaaggttgtggctggcagatcacttgaagggtctctttggtagagtccatgcaaactctcatggggttgctttctgccataaaggaaccacagaaaggcctagaaactggagcaggagggggacttgtggcaaaactttctgccctgcctttccaatttgcatctgtcttagaactgccaggtcttttagttttctttgttttttcatcatttgtatgtctgcctttctttcttttccttccttccttccttccttcttgtatgcctgcctttctttcccttccttccttccttccctccttccttccttccttctttccttccttccttccttctttcttttcttttctttttttcagagtgtcactctgttgcccaggctggagtgcagtggtgtgatctcagctcattgcaacctttgcctcccaggttctagagattcttgtgcctcagcctcctgagtagctgggactacaggcacccgccaccacgcttggctaatttttgtattttcagtagagacgggttttcaccatgttggccagactggtctcgaactcctggccccaagcgatctgcccacctcggcctcccaaaatgctgggataacagctgtgagccactgtgcctggccatcttgtactgatttctaataccatgccctcctgcttggctgtttattgctccactgctaatgatgatgggtccagactcctgcaccacccttggctcagggcaagagaggcctctggccaagccctgtgtttagtgggctctggtctggtacctccaggctatgcaccttcccctaggctgaggggttcagggagccgtggggatgcagccacctgaaccctatactcccacttttctgctccacactctaggtacctggaccaaaatcccctgcccaatcagatcagaagccatttccagggcctgtaccagtctctcccccagctcatcctcccgagggtggcccacagtaagggtatgagcatccctgaacctgagccaagggagctgtttatggggggtgtggatggtgtttgcacatgtgggctggggcgtccacgtgcatgcaaggccccttagggtgcaggtcagagcccaggtcgggagcggggcagcccgggacttcagtgggttctgtccatgctgccacgtcctgatgccaaactctggaaagtctgagaattccagattcaaacctgaccttccaggtccttctgaaggtgcatttgtcaaggtaggaggatagaaggaaaactaggtcgtgtgcagtggctcacacctgtaattccagcattttggaaggttgtggctggcagatcacttgagcccaggagtttgagaccagcctgggtaacatggcaaaacccctgtctctacagaaaataaaaaaattagccgggtgtggtggtgcatgcctgtggtctcagctactcagaggatgaggtaggaggattgcttgagcctgagaggtcgaggctgcagtgagctgtgatcatcgtgccctgcattccagcctgcgtaacagagcgagaccctgtctcaaagaaaaaagaaaaagaaaaagaaagaaaagaaaaactaggttagcaaaggcacaaggcacacttggacattgaccacttcacccagccaggtcctcagaacagagcccacgccctggtattcagtgagtgtggtctaacaagtgaggcagcctgctggagtcaggcacttggctatgagtcacagcccttccattcactggctgtgtgaccttaggaaagtcatttcacctccctgagccttactcacctcatctataaaatgggagtgatgccaatgggataaataaggcaacacaggtgaagtgcctaacacagtgtctggcctgcagctaaaactcaacaactggcagttgtttggatgacacgaaacatgctgccagggctcagggccttgcccagtaaacacccaggcttttctggtgctcatgaccccagaaatgttgctggtattcgtcctgttaaattctgtgctgcttttctcttctttgggtggcccctgtggaagatgtgcttggtcatgactttttaaactttattatttttattttattttattttatttatttatttatttatttatttatttatttatttatttatttatttatttgagatggagtctcactcacccagtctggagtgcaatggcacgatctcggctcattgcaacctccgcctcctgggttcaagcgattctcatgcctcagcctcccaagtagctggaaatacaggcacgcgccaccaggcccagctaatttttatattttgggtagagacagggtttcaccatgttggccaggctggtctcaaactcctgacctcaggtgatctacctgccttggcctcccagagtgctaggattacaggtgtaagccactgagctcaacctatttttgtttatttattaacttatttatagagacagggtctggttctgtccctcaggctggagtgcagtggcacaatcatagctcactgcagtctccacctcccgggctcaagcgatcaccctgcctcagcctcctgagtagctgggatcataggcacatgccatcacacctggctaatttttatttatttatttattttgtagaaacagggcctcactatgttgcccaggccggtctcaaactcctggcctcaggcaatcctcccaccttgatctccgaaagtgctgggattacaggtgtgagccaccacgcccagtcaagaactttattgactaataagtcccgtgagttttagatgtcatgaccatttgggaacctgggtgcatagtacattggttaacttgggagacatcaccttttctaaaacacttactggcttaatgtcattggaaaagaaaatgctatggtcaccaatggatgcggtcttcttccaggcggagacagctgtcctttctgtctgaagctactacttccagggttattactgttgctggtggtgataatcctaattctggctttttgggtactgcccaaatacaaaacaagtaagttcttttagtcgctttaccacccgttttcccgtgggcttgggatacagacagcaggacagagggtgaggagaaagagaaaaggggattggaaatagaatagggagaaaatgaaaataggaggaaaacatgagaaaggggggcgggaatggaatagacttcctgaacggttcatgcagagggtaattctttctccagggaaagccttttctgtttgagggcaagcagagctggcttcacagacgtacagcctgtgctgtcacacagggccctgtgccaagaagaactccacatttggtatttgtttatttatttatttatttatttttgagacagagttttgctcttgttccccaggctggagtgcagtggtacgatctcggctcactgcagcttccgcctcctgggttcaagcaattctcctgcctcagcctcccaagaagctgggattacaggtttccgccaccatacccagctaattttttgtatttttagtagagacagggtttcaccatgttggccaggctggtcccgaactcccagcctcaggtgatccacctgcctcagtttcccaaagtgctgggattacaggtgtgagccactgctcccggctgcatcttgaaattcttcataattttttgtacgctcttttaaaaattgttaatggtggtaaaatatacataacactaaatgggccactttaacctgcttaaatgcatagttcggtggcattaagcacgttcccattgtcatgcacccttctccaccatccatgtccagaactttttcatcttcccaaactgaaactctgtccccattacacactagctccccatcccctcttcccccgggctctgccaaccaccattctgctttctatctccattagtttgactcctctaggcacctcatggaagtggaagcatttatcctttcataactggcttatttcacttcgattaatgtcctcaaggttcatccatgttgtcatatgtgtcagaatttccttccttgataagactgaagaatgtcccattgtacataaatacgccacactttgtttatccatttatcccccatgggtacccgggttgcttccaccttttgtctattgtttaataatgctaggaacgtgggtgtgaaattattaatgtttttaaacaagaggcccttttcctcgtatgactgcttgtgaaagatgtactcggtcctgactttaagaacttgtgttcctttttttctctctctctctcttctttttttattctatattaaatggagacggggcctcactatgttgcccaggctggtctcgaacacttgggctcaaacaatcctcccacctcggcctcccacagtgttgggattataggcgtgagccactgtgccgggccaagaacttgtgttcttaattaaacacaagtttaaggcctgtgaacagtgttcatttcgcactgggcgctgcaagtggtgcggctgctcctgactgcaagtgcctcaagcgagagctttgccttgagtgactctagatctgccacatacgtaggggaggttcagtgcatgaggacaaacaagcgtcatcccattagcacaaaagacaccttcaaaaggtttacaattgtttggggctggaagtattgaaaatattaggttggtgcataagtaattgcaatttttgccatacttttatggcaaaacccacaattactttttttttttttttgaaatggagtctcgctctgttgcccaggctggagtgcagtggtgcaatctcggctcacagcagcctctgtctccctggttcaagcgattctcctgcctcagcctcctgagtagctgggattacaggcacccaccaccatgtatttttagtaaagacagggtttcaccatgttggtcaggttggtcttgaactcctgacctcaggtgatctgctcgcctcagcctcccaaagtgctgggattacagatgtgagccattacgcccggcccacagttacttttgcaccaacctaatatatacatattttttatttctacatttctatgctttctagattttcaatgtagaagtataatctattctactataagattttttaaaaaactttattaaacacaccagactcaaaaaaacaaaaacagaaacaaaaaagcatcatttctctcttccccaccttaagtgctacatccagcagaaaacttgtcaatgttattagaagcctcagttacagcttttttaaaaaaatgttttttagagacggggtctcactgtgttgcctaggctggtcttgaactcctggactcaggcgatcctcccacctcagcctcccaaagtgctgggattacaggcatgagccactgcactcagcccagttactgcttttcattcctcacgtcttatggccaccactggttaagccttcaaagtggttttttcatttggtacacgagtgcagaaggatatgaagatttacacaaaagacagtttgggtctcagcactggcccccatcagcaagctgagggctgttggacaagcccctcaggctgttgcttctgagcctcagtgttctgagttgtggaatgggccatggagatattgtcagaactggcaagagaaccaattgagaaccatctccagagagtcacaactcagagaagtcagggactcagttgacataaaacttgaacacagaggtcacaagttatacatctgatgcatctttaagattttattttatttcatttcttttttttagagatggggcttcactgtgttgcccaggctggagtgcagtggtgccaccatagctcactgtaacctcccaccttagcctccctagtagctgggaatacaggtatgcaccacaactcctggctaattttttttttttttttttttttttgaggcagagtctcgctctgttgcccaggctggagtgcagtggcacaatctccgctcactgcaacctctgcctcccaggttcaagcgtttctcctgcctcagcatcctgagtagctgggattacaggcgcccaccaccacgctaggctaatttttgtatttttagtagagatggggtttcactatgttggccaggctggtcttgaacttctgacctcgtgatccgcccaccgcggcctcccaaagtgctggggctggtgagccaccgcgcctgacatttttttttttttttttttttttgagacaggatctcacttccatcacccaaggctggagtgcggtggtgcaatcatggctcactgcagccttgacctcccaggcctcctcctgcctcagctacctgagtagttgggaccacaggcgcgcaccaccatgcctggctaattttttttttttttgtaggtttcaccatgtttcccaggctagtcttgaactcctggactcaaaccatcctcctgcctcagcctcccaaagtgctgggattacagttttttgttttttttttaattacaaaattctttttagagacaaggtctcactatgttccccagggtggtcttgaattcctggcttcaagtgatcctcccacctcagcttcccaaagcactgggattacaggcgtgagccactgcaccctggcccacatctcatatgtcttaaaaacatgtttctccttcttataaaaagtccaggttcttgcaaaagtggcattaatatttttgattactggctggagctacaatagaattcagtgaggctggccgggcacagtggctcatgcctgtagtcccagcactttgatcacctgaagtctggagtttgagaccagcctggctaacatggtgaagccccgcctctactaaaaatacaaaaaattagccaggcattgtggcacatgcctgtaatcccagctattcaggaggctgaggcaggagaatcgcttgaaaccaggatgcggaggttgcggtgagcggagattgcaccatggcactccagcctgggcaacagagcaagactccgtctcaaaaaaatacaaaaattagctgggcatggtggtgcacaactgtaatcccagctactcgggaggctgaggcaggaaaatcgcttgaaaccaggatgcggaggttgcggtgagccgagatcacgatagtgccactgcactccagcccaggcgacagagcgagactccatcttaaaaaaaaagaattcaataggccatttacactctcttgaagatattacaaagcttccacagactattctcttcagcgaaggaaagaaaataagtctggctagttcaggcataatctgataggcaaagcatgttcctctgaaggccaggaaaataaatcagaacagcccctggcttggaggagcggtgtctagactccctgttgagtctatagttttcctttgttagacaacagtttgggccattggagcaagtcactctctgtttcagaactttgagggaattctgctccttggccgaggagatgagaaaaatgtggctgaattggtttaatttgatgattcctacctatttacgtaggaaaagctatgagaaataatgtgcccagggaccgtggagacacagccatggaagttggaatctatgcaaatatccttgaaaaacaagcaagtaagagaactttgttgcgtgttttgggtggtttcaggtttttgtctttttattttgttaaggttgtacagacatacgggagtggggggtggagcaaaagggatagagttcaatgtctattgatgcccagtcccactttctaggggtaataaccagttttttaaatccttccacagatattctgtgtgtataataaacaaatggtagtgattgtagcatattgtaggtatgactttctacaccatgattttgtttttttttcatgtaacaacgtatcttggagatttttcacatctgttcagaatgatccacactgtgtttcacagtctttcacggtcacctctcaaagcaggcattgcatattgctttgcagtaaacaagacccagcgcctcggctgatgtattagtccattctcatgctactataaggacatacctgagatggggtagtttataaaggaaagaggtttaattgacccacagttccgcagggcttgggaggcctcgggagacttacaatcatggtggaaggggaagcaaacacatccttcttcccaaggcggtaggagagagaagaatgagagccaagggaagggggaaaccccttataaaaccatcagatcttgtgagaactaactcactgtcactagaagagtatgacagaaaccacccccatgatttaattatctccacctggtccctcccatgagatgtggggattatggggactacaattcaagatgtgatttgggtgaggacacagtcaaaccctatcatcagctgacaatggaacagtcccagcctacatggccacattccagacgcattgctgagcaatttaccgaccttttctaacacaaacgccaccaacccccaatttatgtcattctcattttacagaggaggaatctgtgccagaagtgggatccaggccgtgtgtttccacagcccaagatggtgagcatgttctgcagagtctattccactgccctcatgcgcttagaaattcacataattggcccaataattcctattccttatcttttgcccagaggccaaacactcccaggagctacagtatgccacccccgtgttccaggaggtggcaccaagagagcaaggtgagccacaggttgggataagaggtactggtgaaatgagacaggtggtccctctgatgtcattatattcaggggcttcaggagcccgttaatggggtggatgggagcaatgcaggcacactgcaaggaaccaatggcaaccagcaccccagctcctaaaaaaatctcatcaggagatggagggtgaggaagagggaaagatgtggtgggggaatgtcatagaaaaaaaacccagagaggaggatacaggatcactactcaaacatttccttccttccttccttccctctctccctccctccctctctctctttctttctttctctttctgtctctctttattttttctttttctttctttctctttctttctttctttctttcttctttctttcttttctttctctctctctctctttctttttctctttcttttctttctttcctgcctttctccttttttttgagactctcactctgttgcccaggctagagtgcagtggcacaatctcagctcactgcaccctctacctcttgggctgaagcagtcgtcccaccttagcctcctgagtagctgggactacaggtgtgcaccaccatgtctgactaattttttttttttttttggatagagacaagtatcttgctatattgcccaagctggtcttgaactcctgggctcaaccaatcttcctgcctcggcctcccaaagtgttgggattacaggcatgaggcattatgcccagctaacattttcaagaataaattatttaacacagtccaggaaaaaattagttaatacctggttctgtcaggccacccagctactagaaataggatttttaaaaacagccttgctggtcacatatcctaagtaaattattttcccttttatatttcagaagcctgtgattcttataaatctggatatgtctattctgaactcaacttctgaaatttacagaaacaaactacatctcagggtaagatgctttttatgaagctgatttccatgaacaaaaagcaaacttgaggctgaggcaggtggattacttgaggtcaggagttcgagaccagcctggccaacatggcaaaaaccccatctctactaaaaatacaaaaattagccaggtgtggtggtgtgtgtgtgtagtcccagctactcgggaggctgaggcaggagaatcacttgagcccgggaggcagaggttgcagtgagccaagatcgtgccactgcactacagcctgggcgacaagagcaagacttcatctcaaaaaaaaaaaaaaaaaaaaaaaagatattgatattcattgatgttcatgatttagctagccctccagatttagctaatgccaaaggtgtgccttgatgtgctgccagggagagagcccacagagttgagttgtgggggagggagaatgttttagtcccctagggctgctgccacaaatgaccacaagttggtggcttagagcaaccatttctgtagagccatgctccctccaaaagttgtggggaggaccctccttgcctcttccagcttctggggctccagacattgcttgtggttgcctcccttcaacttctgcctctgtcttcacgtggccttttatattctctcttgtctctctctttttttttttgagatggagtctcactctgttgcccaggctggagttcagtagcgcgatcttggctcacttcaatctccatcttcccagttcaagcgattctcatgcctcgacctcccgagtagctgggattacaggtgcccgctaccacgcccagctaatttttgtatttttagtagagatggggtttcactatggtggccaggctggtcttgaactcctgacctcagatgatctgcctgcctcggcctcccaaagtgctggaactacaagcctgagccaccgtgcccggccctgaatcgctttagtaaataaagggtctccaagaataaattcatccgaacatgcatccttctctgagccttctgactcttcaatattctgctcacacctgtctggcatctccatgatcttttccactggtcagcactgtccaatagaaatataatgtcagccacatgggcacttgtcactctttctagtagacacaataaaaaaatgaaaagatggccgggcacggtggctcacgcctataatcccagcactttgggaggccaaggtgggtggatcacttcaggtcaggagttcaagaccagcttggccaacatggtgaaaccccgtctgtactaaaaatacaaaaaaattagctgggcacagtggcgggcacttgtaattccatctacttaggaggctgaggcatgagaatcgcttaaatctggtaggcagaggttgcagtgagccaagatcgcaccacagcactccagcctgggcaacagagtgagaccctgtgttaagaaaagaaaagagaaaagaagaaaagaaaagaaaaaggaaaaggaaggaaggaaggaaagagagaaaagaagagaaacaggtgaaatgaattggaataatatattttatttaacccagcatatccaaaatcctatcattttaacaagtacaactaccctatttccctcagaatgtagcattgcctctggtttgctgtggatcctgtattggaccactcagctgtagagtcctgtgggatccaagcttcaaggagacccatcatgcatgtttagggccagttccaggtgtccttgacatgacactaaacctccatttcctttgttttggagacggagtctggctctgtcgcccaggttggagtgccatggtacgaccttggctcactgcaacctccgcctcccggattaaagcgattctcctgcctcagcctctcaagtagctggcattataggcgtgtgccaccatgcccggctaatttttgtattttgtagtagagacagggttttgccatgttggccaggctggtcttcaactcctgacctcaagtgatccgcccacctcggactcccaaagtgctgggattacaggcgtgagccacctcgcctggccctccatttcctgatctagtcttatatccacgctcaccacctcagcacgctcagacccacgctgctgtgggctcctctggctcctggaagagtgcgtccgcagatgctgcagtctttgtgtggctcagcaattgccactcacatcaggaactgcctttaccctgtcaggctctactgagacccgaccctggttattaagctataggggagacaaggatggatcttaaagaagacaagcaaaatgtagtgaagcaaatagaatggtggttcctgggggatgggggcaggggacaacgaggagtgactggctaacagatacagcgtttcagtttggaaagacaaaaaagttctggaaaaaagatggaaggtggtgatggttgcacaataatatgagttttgttgttgttgttttttgagacagagtctctctctgttgcccaggctggagtgcaggggcacgatttcggctcactgcaacctctgcctcccgggttcaagcgattcttgtgcctcagcctcccaagtagctgggattacaggcacccaccaccatgcccagctaatttttgtatttttagtaaagatgaggtttcaccatgttggccaggctggtctcaaactcctgacctcaaatgattggcctgccttggcctcccaaagtgctgggattacaggcatgagctattgcgcccggcaatatgaatgaatgtttttaataccattgaattacacacctaaaattggttaaaatggtaaaaaattttatgttatgtataacttaccacaataatttaaaaaatattgtgaagcgcctgcctcatgtgaggtcttctaataagaggggctgttctccttctcaagagcgctcgcgggcattgggagtttcttattctcaaatgtccacatcccaaggcctaccccgtccctgtcagtgtcagaagttagcagagcagaactgctagatgtgctcactccatctcctccatggttggcccaccctttcgatcagatcctggaattggctttcagcacagccttccagctggctgtgataaatgagagtggcttaaaccctgtcatcagggtttcacagcttgccctgaaccgtagcctctcattttctccttgcaaatcttctaaggcagctaagagaagccaattaacttcacaatccacataattagcattgccccaaacctttcaagtgctggaatgctggcgtccactagtgcctcatttctttctaaacctcattccacatggcaggggaaggtcttaggaattgtggagctgtggcgttctaagggttctcactgcctacctatcaccagcaagggagtccttgttgccatccatccctagggggtaattttgttccctgaggctgctttctagggacttctggtcgcttgttttatcctggaccagacctgaaagcagagcctgaaataaggccttctatgcacatcatttatgtaggaggtggccctaggaagcaggcccaatgcgccatgggaaaaaccagtaccagggtgttttgctgagttgagcactgtggtgggcagctggacatgagcccactggaatcttctgaagagcccaagagcctcttctcagtattgtccacttgaggattgatagtgagaggcatttatccactggtgtccaacgctcactggttgaggatcaccccagaaagcgacacctcccccacttctagactagcatgtgggtattccaagcaggcttacctcagtgtctcaccccaggcactgcaaacaccccaggacagaaagtgaacatgtgtattgtgcaattgaagcaagacactatcagtgcaaagtgagtagaccctcagatgctgctgggtcagagggaaggcccagggatatgacacaggacacagaggtggcagatacaccacctcccaacatttcctctatcacagcaactagaacaatggcaacaataggggtgggtgtggtggctcacgcctataatcccaataccctgggaggccaaggcagaaggattgcttgagcccaggagttcaagactagcctgggcaacttggcgaaaccctgtctctacaaacatatttgtatgtgattgaacaagtagaacaatggaacggaaagtccagatgtagttctaaatatgtacaggaacttagtataggataaatatggcatcttaaatcaatggggaaaagatggattattcaacatattgtaaaaacttgagaatcacattaaaaaagttggactcctacctcattctttacaacaaaattaattctgatagatgtagtcacagaagagctagaagaatatgcaggggatttaaaaataatcttgaagtggggaggacttttataggtatgactcacaacccagaaaacataaaggattgttaaatttaattagataaatcatttaattagatgaaacatttaaaaattacatttagaaatcataaactaaatccaaagaataactaggggccgggcgcagtggctcacgtctgtaatcccatggggcaggtggatcacctgaggttgggagtttgagaccagcctgtccaacacggtgaaaccccgtctctactaaaaatacaaaaattagttggtgtggtggcacatacctgtagtccctgctactggggaggctgaggcatgagaattgcttgaacctgggaggtggaggttgcagtgagccaagatcgcgccactgcattccagcctgggcgacagagcaagactccatctcaaaaaaaaaaaaaaaaaaaaaaaaaaaaaaaagaataactagggagaaaacaccatgatgtgttgcataataacatttcagtcattcatggaccaaatataaaatggggtcccaaaaaactataataccgtgtttttactgtaccttttctatgtttagacacatttagatacacaaatacttaccattgtgctacaattgcctagtgttcagtagcatgctgtacaggtttatccctaggaagaatagactatcccacacaccctaggcgtgtagcaggctatgccatctaggtttgtgtgagtacactctatgctgttcaaacagtgacctccactgttaggtgaagcatgactgtattttgagcccaggtctcagatattgtatgaagtttcataatattatgagcttttacaaatcattaagagaaagaccaataatccagtagaaaactgggaaaaggtggcatctgcagggtaacaccagggcagcacagaaatcttgctgggatgaggagctgcaaacatgtgtggtcgactttttggccttctgcctcttctactctcagggatgggggattacaactaaagaagttgtcttttggccgggcgtggtggctcacgcctgtaatcccagcactttgggaggccgaggcgggtggatcacaaggtcaggagatcaagaccatcctggctaacacgatgaaaccccgtctctactaaaaaattcaaaaacattggccgggcgaggtggcgggcacctgtagtcccagctactcgggaggctgaggcagaagaattgtgtgaacccgggaggcggagcttgcagtgagcccagatcgcgccactgcactccagcctgggcgacagaggaaggctccgtctcaaaaaaaaaaaaaaaagaagaagttatcttttctcagtgttgcttctccctaaggatttaaaggggagacctggccagaggaatcatcaacagtggatttgtgatgactggagttcatttccttctttctcaactgtcctggaaggaaatggactagtgccttacctctgactcttccgcagcacacacccaccaccagagacagtaactgagatctgcagtagcacagaaacttacaggttagaaaaattagacacctaaggatttcatgactccagacctgtttccttagcataataccacaccagtaggagaaatacaacttacgaaatttctttgtaaataaattctataacattttgggtaaaaatttatcataaaaaaattattaaaagcaattgggttggaaggaagttctgtcaaaatacaatccaggtgtgcagttctctgataaatttagcagtggttactactgaggcagtctcaaaaaaaagtgtaaaaggactttaaggggtgatgaaaattttctacattgcctttgtggagatggttatacatttgtcaatactcatcaatttgtacatttaaaagaggtaaatttattgtatgtaaattgtatcttaataaaactgattaaaacagacatacaaaccccagaccctctgcagtcctgaatttgagtggaaaatattggtgtgaactcataatttatttttcatttgttattattattattattttggagatggagtctcaccctgttgcccaggctggagtgcagtggcatgatcttggctcactgcaatctctgcctcccaggtccaagcaattctcctgcttcaaactcccaagtagctgggattacaggcgcctgccaccatgcccagttaatttttgtatttgtagaagaaacggggtttcaccgtgttggccaggctgatcttgaactcttgacctcaaatgatccacccacctcagtctcccaaagtgctgggattacaggcgtgagccaccgtgcccggccttattttttattttttttgagacagggtcttgctctgttgcccaggcaggagtacagtggtgtgatccaagctccctgcggctttgactccccgggctcaagccgtccacacccatcagcttcccaagtagctgggactataggcctgagccactatgactggctaattttcaaagcttttttttttagagatgtggtctatgttgcctaggctggtctcgaactccaggactcaagtgatcctcctgtctcagcctcccaaagtattgggattacaggtatgagccaccacatctggccaatttttttttcagggaggaaatacacactctcctatatttgctagctcttaatactggaaaggcctagaaacaaagactgccttctatcaatgagcattcctagtatccaaagtatggtgtccacttttttccaataaaaaaaaccccagagctccttggaatatacaatctctacagtagttattagaaggaaattatcaaagactagtaaggtgtgtcaaaaagacttgaggctggccaggcacagtggctcacacttgtaattccaacactttgggaggctgaggtgggcagatcacctgaggtcaggagttcaagaccagcctggccaatatggtgaaactttactaaaaatacaaaaaattaaccacgtgtggtagcaggcgcctgtaatcccagctactcaggaggctgaggcagggaggctttaacccgggaggcagaggttgcagtaggccaagatcgcaccactgcactccagactgtgtgacagagcaagactgtctcaagaaaaaaaaaaaaaaagacttgaggccaacttgaggttcccattggccaaagatgggacaatttgagcatcaaaaggaataattactttaaataatccagcatttatcctacctttcccatacctctaggtaagcaaatactcggtgagaagcttttcttcatagaagtactctagcaaacggccgggtgcggtggctcatgcctgtaatcccagcactttgggaggccgaggcgggcggatcacctgaggtcgggagttcaagaccagcctgaccaacatggagaaaccccatctctactaaaaatacaaaattagcagggcatggtggcgcatgcctgtaatcccagctacttggaaaggctgaagcaggagaatcacttgaacctcggaggcggaggttgcagtgagctgagtttgcgccactgtactccagcctgggcaacaagagtgaaactccaactcaaaaaaaaaaaaaaacaacaaaaaaagtactctagccaacaaagaaggaagatagaatatcaccattttgcaagctttaatgaactcaccacttgaggtattaatcaatggttgctggccaccccaaaaaagaaacaaacagacactactaccacttcctttttttttttttttttttttttgagacagcgtctcactgtgtcacccaggctggagtacaatggcgcgatcttggctcactgcaacctctgcctcctgggttcaagcgattctcctgcctcagcctcccaagtagctgggattacaggcgcccaccaccacgcccagctaattttttgtatttttagtagtttcaccatgttggccaggctggtctcaaactcctgaccgcaggtaatccacctgcctcagcctcccaaagggttgggattacaagcgtcagccactggccaactcagtgctattcttatttcatctcccaccacttaaaaaagtttgttttaaacaggagaattataaagcaagtctcaattaccataaatgtatgtatctgtcagacaaggatttttttaaaaagaaaaatataaacatactaccattatcacacccaacaaaattgtaaataattccttgatatcatgtagtgttatttttttaatgtgataatagtgtggttattaacaaaagatccttaaatatttccagattaaatggtagctgctatctgccttgaaataatattcaaggaggccaggtgaggtggttcatgcctgtaatccccatattttgggaggctgagacaggaggatcacttgagcctaggagtttgagaccagcctgggccacatagtgagaccctgtctcttaaattaataaataaatgtaaataaataaattactgatataatatggaagggtggtattagtggatgaggtgggactggccaaaggttgattgttgttggtgctagatgatcactacatagaattagtacaattatatgtctgcttttaaaattctccataataaaaaaaagcataaaataaccaaaacaaggctaggtgcagtggctcaaaattgttatcccatcattttaggaggtcaaggcaggaggactacttgaggctcggagtgaaagatcagcttagccaacatagtgagaccctgtctctacaaaaaaaattaaaattaaaataaaaaaaaaaagagaaaaacctaccaagtaaaatcaattaagtcagtcaaacttttgaaatattttacaggcactatcagttggaatttttgtcaagttggtaacaatgggatattttacacaatcatatcaacacataaaagttaaaagatttcttataaacatagatattagacaggaaacaaactacaatatatgacatctaacatatattttagttgcttttcaaaaatccgtaaatactctaagttttaaaagtttagttttaggttaatttttgatatctgacagtatagatgtggcagattccataaagaccttttccttcctggtaacaaagcccatttctgagagagtaagatactattgcagcctcaagggataaattgcgtttgatctaaatcagatcattttcattcccttggatggtgatttgcctagaaattatcatgtgatttagttctgaccaaagagatgtaaagacatctcccgactgggatgtctggaaaagtttttacttccctaatttaaaagggaagagtgttggctgactagctcttgtctctttaacttttctcctaactagaatgataattaggctggaaatacagcagccacctaagatcccgaagcaacaatgataaacaccagcgtactaaacatggcagaacagaagggaagtgcctgggtccctaactatagaaacagtaatactagctttggacagtctacccgctagagttcttgtatgtaagaaaaacaaaccccaatttgcttaatccagtatagtagatttttgtttcttgtagctgaacatattcctgatacaatgaaagacataaaaaatataaacactgaatgaaagcaagcaccacaaatgtccactttataagtgcaaaggggctagaaataaatctaagtgaacataagacaaccaaattaggagagaagaatatttattatacaaatataaaaatctatacattcttagctgatgatatatacttaatcaaaaagtcttttaatttggatatatgcatcatttccttcattgtggtgtctctgcttctcagatgtattaatccattctccaaagtagtttcagtaaccaaaactgtgaagagaatactcatttcatcatacctaagaaaaaagtagttaaacagacacatgagcacaaatgtaaataataaattcctccacgttgccagctgtaattcagtgttcatgcactctcaagagtcacagactcagggcttaagggtggaccaaaaaaacccaacatttttaaagtttctgaattgtatttaaagtaatattttcagacagtttctaacttattgctagagctgaaaagtcataaaagaaaataaaatctgagaataaacactggtacctcaacacatcatttggggtgatatcacagaagaaccgcataataacctcagccttttggttcttggatgcaatccaagaacaattattttagactgaagtctcttacaataaacaatattataataaagatgcaatttggtataacaaattataccaaaatcatgtttcctttattgagtagctagcttatagcttctagttcagcaataaccaaacagatagatgcacggctgaccttctgtatgcttaccaagtcacactatctcattactgtttatttcctttgtaggactccatcagaaactttttatttctctgtttatttattgtctattttgtcctactagaatataagcttaacaagaatagtatggctgggcgtggtgactcatgcctgtaatcccagcactttgggaggctgagatgggcggatcatgaggtcaggagttcgagaccagcctggccaacatagtgaaaccccatctctaccaaaactacaaaaaattagctgggcgtggtggcaggcgcatgtaatcccagctactcgggaggctgaggcaggagaatcgcttgaacacgggaggcagaggttgcactaagccgagatcacgccattgcaccagcccgggcgacagtgcgagactctgtcttaaaaaaaaagaatgatacatttttctgtgttgttcaccactatagcaaagtgaataaaacatagtacgtgtttaataataatttcataaaaatatcctgggacaataaaacctttaccatataaagaacaactgcaacttgacaatgtccacatggctcaaaggataagaattgagaacctgagaggacaagaaagttcaagtgctgccccttcattttacacataataaaaccattagatgctctaattatagaaaactacttttctttggacatcatctgaaaggtgttttttttttttttttttgagaaggagtctcgctctgtcacccaggatggagtgcagtggcttgatctcagctcactgcaacctccgcctcctgggttcaagcaattctcctgcctcagcctcccaagtagctaggactacaggcacaagccaccatggccaggtaattttttgtatttttagtagagacggggttttgctatgttggccaggctggtcttgaactcctgacctcaggtgatctgcccgcctcaacctcccaaagtgctgggattacaggtgtgagccactgcgcccagcctggaaggtgtattttaacaaatgttcagagaactgaagatcaaaacacaatggttcacaacttttcacccaaaagatacatattcaacacaaaaagcttaaaaaaaataacaagaatggattatttaaaaacaacaattaatgaaatagcatggggtgagactagacacagagagctcaattaggagatgatttcaataatccaggcaagagatattggtgactctaacttgggtagtggcagcgaagacagagatggatgagatacatttaggaagcaagctgacagcatttgatgatagactggatgtagagaatgaggaagagggaggagttaaggatgatagccagtttctctgtcttgagcaattgggtgaacagaggtgccaatcccttagaagactagaacagaccatccctccagaatagaattcccttccactcagtctcagaatggaccacaatgccagcaaagaaaggcattccactcatattccttcagtcttgattcaacacatgctctctacatacatactttcatccataagtggataagctgaggtatacatacttcatgacattaagtcttggaactacatacagcatgtgctcaaacatacttgctgaatactgttccctgctgaggcaattaactaaatgcacatagttctgtaaaagggaaactgaggaataatttaaaattatattttatatataaatttagaagagatttgtttctgtaattcataaacataatcaaaaactcttgaataaatacactctttaatgaaaatacaattcttacttcgaataaagttgttccaatgaggactgcatagtttccaaataaccaggccacacagaaatcccattttctagtaactcattaaatagcccttgacaaacctagaaagaaatagaaaaacttcaaatatgaaagaaataatggtagctagagtgattattctatttttgtgaagccacaaatcaccctcttcaatctctaaaatgggtatgtttctttaattatgtgatgttaatgtttataacttccatatcatatactttataaatcgtatacttcttctgaaaatgaagtaattaagcatagcaaagctgaatactaaatgccaatcttctgagaaatttgtatatcaaataagaatttttattacccttagtatcattcaaaacacaaacaaaaccaaaacagattctgtcagaaaaaaaccaggagatccaaagggctgtatgaactcagagccctcatctgagaggtgagacctgagccctaggttataccaccaagtcaggaagaggcagaagagccaggaaagaaaaaggatgagaaaaaggagagtggtattccagaagcaaaccccggaaaatgtttcaagaagagactgatcaacccatttcactggaatgctggagacaaaagcttgactggaaatacagaagtaacgatgaataaatgacacagtaaacttaactgttttctttacaagcaatagggaagcaaaacaaagcaaaatttaaaaaccccttaacagtctagcaccaacagtccagagcagggttcctcacccttgcactgctgacccagggtgtttagcagcattcctggcctccaggagaggcctgcagcaccctcccactcttaggacaaccacaaatctctccagacattactaaatggtgactgagctacagcatcctaggagcttcctagcttataagggtattagggaggctgccataccctgggagaaaatgtgggacatacgccattatcttctccttctttgagctcactatctcccatcttcccagacctctccacaaaagccagggtcagaaagctgggggactctcaaagtctttaaatctttttagtgtccgcattcaggtctgggctgggtctcaatcacccagacagaaatgacgactgctgaaggagtctctggaacgaaatgaaagccatcccccatggcctttcttaagagtatttaatcattagaacaaattagaaaaatcaaaataaaattatagatctagaatatctgaatatagtcagttaccaaaagtgttaagttcaaaggggaaaggctgcgcacggtggctcacgcctgtaatcccagcacgttgggaggccgaggtgggcggatcacttgaggtcaggagttggagaccagcctggccaacatggtgaaaccctgtctctactaaaaatactaaaaaattagccaggtgtggcggtgtgtacctgtaatcccatctactagggaggctgaggcaggagaattgcttgaacctgggaggcagaggttgcagtgagccgagatcgtgccactgcactccagcctgggtaacagagcaagactccgtctcaaaataaataaataaataaataaaaagttcaaaggggaaagaaataattcacattcactaacatgtgtacaaatattttaattactatgtctactcactaaaaagtgaaactatgaatgggcatgaacagcaaacccaatgaactgtattcagcttctttaacacacttcaaaattatatataatcacagtacttacccacagttcattatttaattaaagctttttttttttttttttttttttctgaagcagggtcttgctctgtcacccaggctggagtgcagtgctgcgatctcggctcactgcaacctccacctcccaggttcaagtgattcttgtgccttagcctcctgaatagctggaattacaggcacataccattatgctcggctaatttttgtattttcagtagagaccaggttttgccatattggccaggcaaattaaaaacttttttttttttttttgagacggagtctctgtcgcccaggctggagtgcagtggtgctatctcagctcactgcaacctctgcctcctaggttcaagtgattctcctgccttagcctcctgagtatctgggactacaggtgcgtgccaccacgcccagctaatttttgtatttttagtagatggggtttcaccatattggccaggatggtctcgatctcttgacctcgtgatccacccgctttggcctcccaaagtgctgggattacaggcgtgagccaccacgcccgacctaaaacattttaaaaagcaaatgaatcaaaataaaattttaaatggcaagctatcaagtttacttagagtaagggttaggttgagcatccctaatcagaaaatccgaaatccaaaatgctccaaaacctgaaaccttgagttcaaaggaaatgctcatcagaacatttaagattttggatttttggattagagatgcaaatataccaaaaaaatccgagatccaaaatggtcctggtccaaagcgtttttggataatactcaatctgtaattaaaatgacatttaaactcatttaactcacctgtcttagttccaatgtggggcctcttcctacatccaaagcaaccttaataggggctaaacaagggtgaagtttaagtacctaaggcaattaaatgggggagggagaagacaggaaaggggaaaaagcatagtttgtttaaatataacacaagtttaaatataacacaagtattaacaaacagtttcttaacagttataattttctgtgtgaaaacagaagttagctgaggtcataaaaacaccatgtagtaacatattcagctgccccccagatttctccacttagatgtttggcagaaagaaattaatttggccaggcatggtggtacatgcctataattccagcactttgggaggctgaggcaggtggattccttgagctcaggagtttgagaccagcctgggcaacacggtgaaaacttctctctaccaaaaaaatacaaaaaaattagctaggtatggcgcatacctgtagtcccagctactcaggcggctgaggtgggaagaatgcttgacccgggaggtcaaggctgcagtgagccaagatcgtgccactgcactctagtctgggcgacagagtgagatcctgtctcaaaaaaaaaaaaaaacaaattaacttgagaccctcccattttctgacaactccctcagtcaaaatgcttctttcagcatcactttggaccctaccagcctgggccacgtggcttaccatttcaactttctctctcttgtcaaaacctactgttcttctctttttatatatatttttttgaatgaaaaaaatttttaaatgaaatttgctttttttttttttttaaagggtctggctctgttgcccaggctagaatgctccactcactgcctcactgcaacccccacctctgggctcaagccatcctcccacttcagcctcctaagtagcagggactacaggtgcacgccaccacgcccagctagttttagtatttttttgtagagatgaagttttgccatgttgcccagacagactggtctcgaactcctgacctgaatgatccacccaccttggcttcccaaagtgctgggattataggcgtgagccattcagcccagccttctcttctcattcattagtccatccaacaaacattttaatgcctctgataccaggaacagttccaggtgctaggggtaaaaatctccgtctctcgtggcagggagaaacagacaataaaaataagtaaataatatatgtgaaggtggtaggtgctaaaaaaggaagaagatggaacatgctggcaagaggcaggctgggggaggttttcagcaactttaaggtggtcagaaaaggttctctccctatggtgacacttgagcaaacactcgaaagaaggtggggggacgagacatggatgatgaagaaagagcactctaggcaatggggaatacaaatgacagggctctgagctggcagcatctccagcatgttctagaaatagcaaggtcagtgctgctggagcagactgagtgaggtggagaacagcagatcaaaaagagggcttcggtttttcctgagtgagatgagaagctttcctggagtgttctgagcaaaggagcaacacaacatgcaccttttaacagggccactctatcaggggaggaggagtggcggtggcttatagcagggtggtagcagtagacaggctaggaagtggtcagactcaggatacgttttgaagttagagtcaaacaggatttgctgatggtttggaagtggagtgtaagaaaaagaaaggattcctttttttgttagctacaaaccatttataaaccccattccccagaataattctataatcagacttctctatggttatagcaggctaaatgaacactgtataataaatcacttaactaagaagagtggtttcctacaaactcatggttcccaatcccagctgaacactcaacattatttgttaaaacttttgatttggggcagcttccttttatgttcaaagggtatatgactattccccactcgtgccatttaaacccccactcttccacatttaaactaatagtgcctcctaactccctgagaaaatagagggcatcagtaaaatgtccttcaaagaccaaaaagcccagtagcctttttatatctcactatcctttttcttcttccctgctgtttcaaatatctccttttcaagatacattcttctacttgggctcttgatcccatcctgacccctccggtttccttcatcttgccccattaatcatttcttttctctcctataacttcaacttctcctctcgattttctttgacccataaacatgctccaagtgcatgttcatgcactaaaatcagcctttccaggcccacatctagctcctctgatccaggaaccagccatgtggcacaagaccagaagccagacacctggggcagagaggtcaatagcacaggtctccctgatccgggtctttcttcctcctatgtaccaatgcttcagcttctgatacaaatggaagcccacagtggaaaggttcaggggctaggagtcatagagatagctgtctgttcacaattaaacagaaatgcctttgggattacttattagggatgccttgttctattctgtgagaacctgattcttattcctgtggccagattctaaaaaaactgaaaaatacttagactacatgcactaaatttattatttagagtttatgttagaaaccgagcacactaacattaagaacaaacaaacccatatttttagtttcccaagtctatctctgaaatatcaacagcacctttctatgaagatttttctttcttgtaaaggagttctctgtcagctggaaagaatcatagaggtaggccagcatgcctcggtctaggtccccatttacagagagaacacaaggaaccacattttttcgtccatctcggcccttcacagaaaaacagaagaaaaataatcatttcacagaactttttttgtttgtttgtttttgagacggagtctcactctgtcacctggccaggctggagtgcagtggcatgatctcagctccctgcaacctctgcctcccaggttcaagtgattctcctgcctcagcctcctgagtacatattttagacttacacaatcagaatacaaaagtaaagtttcattttacaaagcacccactctgtaccaggcctgtggtaggcactgggcccacgaagacgataaagatgcattctctgctctcactgagctcagtgtttcatcagcgaggcccaaatgtgaattttaaaactatggtgcttggttgggctctatcccagagattctgaacgaactcaactggagagggacttaggcatcaattttttcaatagccctacagactatttctttaatgcttccgagctcagagttagtattcagaaaggtaacactttttttttttttaatacagacagagtctcgctctgtcacccaggctggagtgcaatggcatgatctcacctcattgccaacctctgccacccgggttcaagtgattctcttgcctcagtctcctgagtagctaggactacaggcacacaccaccatgtctggctaatttttttctatttttagtagggacggggtttcaccatgttggccaggttgttctcaaactcctcacctcaggtgatcagcccacctcagcctcccaaagtgctgggattacaggcgtgagccactgcgccctacctcgaaaggtaacacttttaagtaaaaattgtttgctgattattcaaaagaggccttagggaaaaaaatggtgtgctttagggaaaggggtttggagtataattttctgaaacgtaaagttattttcataaaaaagaaatctttcaaaaacttactttttgcattaaagccataattatgaaaacaaactacacatagtacatgatatgaattaagtattgataaacagacttacttcttctctaaactgaagaggaatcatttcaaacttcttaaaaatttcaatcctagaaatttcttaagttttggataaaaacagttccactttcatctttctttttttgtaaatcattgttcacctggatattcatgtaatttttaaaaatacttaaataaccacctttagctagagtcacagaacaaaaaaaaaagagagaaaaccccacaaatttaaatcctcagcttctgttaattattcatgatcaaccacagtcttcattaatacatatatgtactgacattttaaacctatttgaattgcatatgatactttaaagattcacaagaatttgccctcaaaggcagtaaactttctgatacctgggactctattctaccagttgtatttcacacagttatcgtcgaactgatagttaataagataaactgggctgggagcagtggctcatgcctgtaatcccagcacatcgggaggccatggtggacgaatcacttgagttcaggagttcgagaccagcctggccaacatggtaaaaccccacctctactaaaaagacaaaaattagctgggcatggtggtgcatgcttgtaatcccagctactcagcaggctgaggcatgagaatcacttgaacccaggaggtggaggctgcagtgagcagacattgtgccactatactccagcctgggtgacagagtgagacaccatctcaaaaaaaaaaaaaaaaaaaaaaagacaaactcaagtactgaaagattctgtggtgcgctttgaatcaaacaaaatctaaatctgaatctttatgaagaatgctttaggctgggcacagtgactcactcctgtaatcctagcactttgggaggccagggcaggaggatcacttgagcccaggagtttgagactagcctgggcaacatggcaagatcccatccctatttaaaacaaacaaaaaagattgtttattgttttctaattttttgaaaattggatatccaacaatgtcaggatatctggtggcaactcttccaacaatatctgatttctcacactatccagaataaattcttttctatcctaactgttcttcagcctttattggtctgcttcactgttctctaaaaaatatatttggacattaaccataaaatcaactaaaaacagatacaaaatggcctaagaggctgggtgcagtggtttacgcctataatcccagcactttgggaggctaaggcaggaggattgcttgagcccaggagttcaagaccagcctgagcaacacagcgagaccccatctctattaaataattttaaaaaaagaaagaaatggcctcagaaacatttcaagaaagcatactaaatgacagaaattctacttaatattttataacatgttcaactaatgataaataattttgtgaactctggaaacagaaaaggaacaatgtcatggaagagaaaaatttctgcaataggaaaactcttcattagtgaaaatgataccaataaaagaacaaaataatctgggcatggtagttcacacctgtaatcttagcactcagaaaggcagaggcaggagaacagcttgagcccaggaattcaagaccagactgggcaacatagcgagaccccattcttcatacaaaagaaaaaaaagaacaaaataagacactaatagccacaatacaaaaatcatctttaaatccctagtcacaaggttgagctgttcgttaactatgataataaccaataagtttcatttgagagctgagtaccccaaaatgaagtgtgatggtggtggagttaaaggaaaatgttcaccagttaataagccttctagtttttcattagttattcatatttaaaaattccagcctggtcaatatggtgaaaccctgtctctactaaaaatacaaaaattaaccgggcgtggtggcgcacacctatagtcctagctactcaggaggctgaggcagaagaactgcttgaacctgggaatcgcgacactgcactccagcctgggcaacagagtgagatgctgtctcaaaaaataaaaaaataaaaattaatctactttctactcattatatataaactcctatgtttttgctatatattttttctttttctttttttttttttttgagacatggtctcatcctgttgcacaggctggagtgcagcagcacagtcttggctcactgatgatcctggaacaatatattgctacaaaaggtaaggaagtgctcgtcaagacaatgatggaaatatgtcaaaaggacactggccaagtctaggacaatttgaccatcaaaataaataatgacagtaacacactgtaaccccctgagaaagtaatctgtgaaataccaatttaaaaaaaaaatggaggagaaggaaaagctctacagtatattgctgaccagtaaatctagaaggaatgatggaatttgtttttttttaaaaaaaaaaaaaagggaaggggaaaaaaacaccattggcaaacctcatcgtagtaactgatttgagcaagaatcatcaagggatgctgcaaccagtaaggcaaaatttggtgacatggccaaacatggtgactcattcttataatccaagcattttgggaggctgaggcagggggattgtttcatcccaggagttcgagaccagcccgggcaacaaagctagaccccgtctctacaaatattaaaccatcagtcgggcatggtgatacatgcttgtagtcctagctacttgggaggctgaggcaggattgcttgagctcaagagtttgaggttgcagtgagctatcaccataccactgtgtttcagcctgagtgatagagtgagatcctgtctcaaataaagaaaaaaaaaaatcaccatttggcaaacctcacattagtaactgatctgggcaagaatcatcaatggatgctgcaaccagtaaggcaaaatttggtgacaaagaaattgtctgcatcatcttaaagtatctgcccacaacacttattaattactagttaatttttttgttttttttttttgagacagagtctcgttctgtcgccaggctgcagtgcagtggcacgatcttggctcatcgcaacctccacctcccgggttcaagcgattctcctgcctcagcctcccaagtagctgagactataagggcaagccaccacatccagctaatttttgtatttttagtagagatggggtttcaccacattggccaggatggtctcaatctcttgacctcatgatcctcccacttcggcctcacaaagtgctgggattacaggcgtgagccactgcgcctggccgttaattaataaatacaaactatttattagctttacactggagaaatctagtagaaaccatcttaactaaatgataaaagttaacatcaccagtaacactcctcatatgacacactgagaagagagcttctcagtactaccacttctgtagtactcccgacaaaaatacataaatcacgtggaaacagcagacagatcccagccaaggcatattctacagattaactagactgtactcttcaaaaatgtcaaggtcacgcaagacaagaggaattgttcatttgaaggagtgtaaaggcatatgacaactacatgaaagacaagatcttggacctataaatgccattattgagataatcagttcaatttgtagggctctgtggcaatagtggattactgttaatttcctgattttgatgactggattgtagttatgtaggtgagtgtctctgcatctgaaaaatacacaatgaagtgttaagacaccacgtttgcaccttattctcaaatggttcggaaatgattatagagaatctgggtaaaaaatacataggagctccaggtaaaacatacatgtaatttagacacattgccaggatacatgtgtaaaagttcgtgatctcctaggttccacagggtttctattaactcctttccccagggaaaattgtagtaaagtttgtttcctttccggccttcttcatcctgacagtcactgctgctgaagttagatggactcatggcaaactggaaaagaaaatttaagtttgtcttaacatatttaaataaacactaatttaactcccataattatctgtaagaatttaaattgtccgatactttttattcagcaaatgtgcgaaactagtcaagtcccgaatacaaattttaaagtttattctaatttacatttttttttgagatgtgtctcattctgttgcccaggttagagtgcagtggctagtcacaggtacaatcatagctcactgctgcctcctactgctggcctcaagcaatcctcctgcctcaggattcagagtagctgggaccacaggttgctgaaatttaatttttaaaaagtgaaaatactggccaggcacagtggctcacgcctgttatgccagctctttgggaggctgaggcagggggatcacttgagcttaggacttcgagaccagcctgggtaacagagcaagacttcatctctacaaataataaaagaagttgcagtgagctgtgattgtgcaacggcagtccagcccgggcaaaagagtgagactatgtctctaaaaaaaccaagatggagtcagttgtaccagtgaaggacaagaaacttctggaggtcaaactaggggagctgccaagctggatcttgatgtgggacttcagccctagtggccttgatggagcgtttcaaagaggttactactggtactacaacaagtacatcaacgtgaagaaggggagcatctcggggtttaccatggtgctggcagggtacatgctcttcatctactgcctttcctacaaggagctcaagcacgagcggctatgcaagtaccactgaagaagacatgctctgcactcccccagcaaccttcttggctgcaacccctccataagcaacacaatctcgattgttgctgaatcctttcatatcctaatgggaattaacctccaaataaaagatgactggtacttgtgaaaaaaaaaaaacaaaaaaaaaaccaaaaacagacaacaaaaataaaataaaataaaaagtgaaaatactgagtatattgcttaacatattgttttttagtaggaaagaactacagagaaaaaactgttgatgttatccagacttttatggccaatgaagaggggaagttaaccatgactaaagtgggataaagaagaaagtatcacatagtcctcattcttacccttctgcgaagttcttgatgactcgtgattatttcatacagtttaaatgggtatttggggatgtttgagtcgggaaatggtaacataacacatggcaagacaaaaatgcttacttcaactctttttttttcagtgagtactaaaacttgatcatcaattacagagccattttgactaatatggaaagttcatggaggtaggtagcaaaagctgaagctgtgacaatggtcaagggtcaaactctacatcagccaggaatgctaggtgagggctttgaattttaccttacacagaaaggctaattaacaaacacatctgagcccaacaaatgtttttaccaaagtaactttgtaatctagaacaatgaaaattgttacaaagagtttttgtatttgtataatatattaatagctacatacatcaaatataatttcttgtatgtcagaagaattaccactgacacattaagacaatttatgtattaactattaaattaaaggtaattattgcagtacctttctccaccactggagtcgatgacgtaaccagaaatcaagccactggtttgaagttctcggaggagtaaaccatactaacgaagcttcagtcttctcaccaatactttagatataaaacgtatcaggaagttagcttatctgaaaattatataatttatcccaagtggaaatgactggtttttgactatttaaatacaaggccaagttatttgccactttttataccttttaacaccatttcgtatctgcttagtgtcaaaaacaggatgaaaacacactccaatctgagcaaggccataaggtagcctcttgtttaccagatccaggcaattaacatagtgttccaaggcacctgtcaaaagataaatcaatcattgtatacatctagtccacaaacccaaatcatttttgtcaatagacacattaatagtagtaataacgttaacacagcataaagacagatgttggctaagcttggtggctcacgcctataatcccagcactttgggaggtcgaggtgggcagattgcttgagctcaggagttctgagaccagactgggcaacacagcaaaaccccatctctaaaaatatacaaaaataagccaggcatggtggtgtgtgccttgtagtcccagctacttggaaagctgggaggtggatcactttagtctgggaggccaaggttgcagtgagctgggatggtgccactgtgctccagcctgggcaacagagtgaaaccctgtcttaaaaaaaaacaaaaaaagacagatcaccacttaattctaggtagtttcaccctgagtttttagtttgaagattttcttttttttttgagatggagtctcgctctgtcgcccaggctggagtgcagtggcagggtctcggctcattgcaacctccgcctcccgggttcatgccattctcctgcctcagcctcccgagtagctgggactacaggcgcccgccaccacgcccggctaattttttctgtatttttagtagagacggggtttcaccgtgttagccaggttggtctcgatctcctgacctcatgatctgcctgccttggcctcccaaagtgctgggattacaggcgtgagccaccgcgcccgacaaagattttcaaatctataagaaagttgaaaaaataataaacatccatatacaatgaacacttgtataccctttacctagattcatcaattatcaacattttgccacatttttttcttgttcactcccaaatactgccgcatacatcttctaaaaataaaaatatttcctatataccattataacaccataaaaagttaaccataataccacaatataatctaacatatggtgatattttagttgttccaattttcaccccaaatatcttttactgttctctttccagttaagattcatgtactgcattctgagtaggtttctttcatccatttgaatctagaacatttcccttgcctcctttcccccttaattttgctattaatgacactgacttttgatgtgagtccaggttagtcatagattgtctcacatttgggatttgtctgattgtttccttatgatttaatttcggctaatcatttttagcaaaatactacatagtagatgtgtgtatcttattgcatcataacatgaggaacatgttatcaaattattccactactgaagacaccaaatttgattacttggttaaggtagtaaatatccactccccaataatatcctgctccccaacagtatttcacccagtattttagaatccattgatgactgttgcttgaatcaatgatatcggggtttgcaatatcatgaaatggtgaattttctaatgtatctttccttctacatttattccatagcttctgtaaaaacataagctttctctacctcttccccccgcccccgacctctagggtcaattatttgtttttgattaatactattgactcttagattttagtcaatgtgttatgatccattaccattaatatgtatcttaatgttcaatttgtcctagatgtggccagtgacaaccctcctcaagccagcatctgtgacctttttatatgacccattagtcttcaagcaattctttgctttttagcaccataaagtgtttcaaactcaccttgtactttccctaaccccagacccggaatcagccatttctcccagtactggttcatcttagaaaccaagatctggaggccgggcgcagtggctcacgcctgtaatcccagcactttgggaggccgaggcgggcggatcacaaggtcaggagatagagaccatcctggctaacaaggtgaaaccccgtctctactaaaaatacaaaaaattagccaggcgtggtggcaagtgcctgtagtctagtcccagctactcgggaggctgaggcaggagaatggcgtgaacctgggagatggagcttgcagtgagccgagattgtgccactgcactccagcctgggcggcagagcgagactctgtctcaaaaaaaaaaaaaaaaggaaccaggatctgggcactaggtgtgctcattgctactgagggtcattgcttctaggaactttaaacgaagaaagttaggaaatatatttttaaaaatcatgaggctgggcactgtggctcacacctgtaatcccagcactttggggggccaagatgggcggattgcttaagctcaggagttcaagaccagcctggacaacatggcaaaacctcatctctacaaaaaacacaaaaattagctgggtgtggtggcatgtgcctgtagtccagctacttgggaggctgaggtgggaggttcacttgagcccgaggtcgaggctgcagtgagccatgatcacaccactgcactcgagtctgggtgacagagtgagacccatattcaattttaatttaccaattcatatttaatttaccaatccatatttaacattagtttatacgtaccttcttttacatattatctcttcttttacaatgaatatcttggttcctaataacaactaacccaactatttgaattttttttttttaagacggagttttgctcttgtcacccaagctggagtgcagtggcgtgatctcggctcactgcaacctctgcctcctgggttcaagcgattctcctgcctcagcctcccaagtagctgggattacaggcgctcgccgtcacggccggctaatttttgtctttttagtagagacggggtttcaccatgttggccaggctagtctcgaactcctgacctcaggtgatccacccgcctctgccttgcaaaatgctgggattacaggcgtgagccactgcgcctggccttgatttatcctatgatatacatgaaatagtttcagaattataatttcaacatttttacttagaataaatctaagaaaagttcaaaatgtctgtgtagttccttatgcacttagactacattgcactaaatgacagcactgtgttcagaagttgccccgtgaaattgagagcgttcccaggtccttcggacagattgtttaaggaacagcaatgattccatggaccagttttctccagggtagagcactgttaatatatccgactacttcaaaaagatgagaactaactaacttccttgcatgggaatacagggccagttgcaatccccaagatccagcaagactgcctcgcctttccacccgacacctgttttgaagcatgaaatcgtgaagcataccgtgaagaaggttctcccgtagtttcccagaagtttttaatacgttctcaagaaatgctactagctgttccttactcagctctttgtcttgcaagatttcgcgtagagtttctgcagaaactaacctgaaggcactgtccccgggtagcaaagggcctggtttgtggtggagggcgtccaccgggaatacctgctccctgaacaccaccaccgaggtccaccattctgcggccaggttcttccgcaactctacgcccaagggtccgaagccggggtggcacccactcagaagagaatcccggctaagctgctgcttgcttccacttaggaaatgccttctctgacagatctctaacagcgcctcgcttccctctccagacccgggggcttctgggtgctcgccgttcccctcgagctccgcgtgcgacttcacatgccctcctttggggctactcctttccgtcaacagctccggctgccccgcatctactcgacccccaaacccagacaacaggcacctgcagaccttatggcaggccctgacggctacacgagagcgcatctctctccgaagttaaagagcacactctcccatcactcaacggatcccaacaagccaccactaccgttaacagaatccggagaggccacggcgcaggcgcaacggaggtgagcgtgcttgcgggcggcaggccccaccccggaagcgcatgtctgcgttccggccgcagccgtcccccgcccaccatggcggacgccggctcggatggttctctgctagcttgccgttcgcgtcgcgcccctcccttcagattgacttttttctttcctcgtaagcaccagtaaaggttattcccacctatttataaccgtggtgtagccacttgagtcacttccttctgccactgttttgcagtccagaaaattaaaatacttcagtattatccaaatcaccttctatatacacctcaatcaagcacttggactaaatttggcatttggtttccctttaaacagttttagtcctttacggtgatttgtaagcccaggccttcttaactaggcaaatgctgccgccaggtggcctaggcctaaccccagagccgttgtcttgacgcttaagcttccggggaggggggcgataggcttcgtgactagggtagtggtatggtcactttaaatattgcagtggcttccaaagggcagtccccagccagcagcatctgcctcacctgggaatgcactagaaataaaccaaggggccctgacatgtcttaaaccctcctggtgtcagagaaaaccacgtacgtgcaatttcttccaggggccccttctatgggttcatcaaaacaatgagacttgtgactgttattattaagagactcatgattaaattgcaggtttctgattttgcagtttctatttaaataggtcgagaccttaagacctacccagaaagtggaaaagtggtatacccagactgaggaagtttgattccaaagtccatgatttcttataccagcctcagttacgaaaacctttaaagaggttcagggaaaaaggaacaatctacatttcactgtgagactaccaaactactacctgattaagaggggtaacagcttagcaattgagttaatgtaattcaggagtaaagttttatcattagtaaagtgctgtaccaggttcaggaaatagttcttctttacaagtgtatacaagggtttaaaaaaaggccagctagatagtaattaactgcaaagctgggtactactgccaggtgttttccacattcaggaactcacaccaggtaaaaggcctatacgcaaataaataaaaagagagaatggggagaaaaatcacatttattagttaagacgaccacaggctggacacaacacacatgctaaaaagtggactgtcttttaaaacttccaaggtaaataggtaaatgttttccacagcccaacaatcatttcagtgtttacaaattaaaaggcccacggttaagacattaaacagtaaaatatgtaataaatgctccaacctaccctctcccccgaaagctgcttctaagtttaaaaccatgaatttgactaaccatgccattgaaaaccatccaggttactacaggctgaattagttttcaatgtctaagtcctagaaatatcactccctatcccagccctagcaaattctaactttacatttgacataaggcattaacatcaattaaagcctcagtttaataatcagaatttaaatgaagtctcctgaagacctctcttctggcaaaaaaaaacacgtatcagactctgggaaaacattcagacccacttctagctattactgaaataaatgattagaaagttacgttggtgagccgaagttaaacctaaagctatcccctggatctttctagcaataaacccatgttgaacctaccatgaaaactttcattcactgtgcttttggttacgttgcctcctgattagtcattaattttaatgaggttttttccttgtgttgagtatgaatagaccttacagtttgaggatctctagaattccctgaattattggaaagacattcatgactcccagtgtgactagttaagagccccagggagcctgtgaagactagaatctacaagtaacctgcactaagaacgaaattcagtaaaggagactcaagcttagctcctggccatcttaaagggctaatgtatgtctttcacaggtttgttcaacatttcagtaattcacagtatagccaagagcatgagtataagtctcttgaaaaagccagttatttggagctttttaaattataaactttgaaaaagtcacccacgttctcacactatatagatgactttgtatctattttactattttctcatttaaccatactagcaaataaggaaaaaggctattaaatgactcccctgatgctggaagctgacaaagcttttatgcaatttagcctgtaactaaaaattcacctgtatcaattcattctgactcctgcaatatgaatagctcattataaagaagggccttctgattccccctgcctcccaaattaaataaaaaggaacagtcatttgttttcatggaaaaaaaaaaccaaacaaaaacaaaaaaaaaaccagaccatcttaagcaaagttttacatgacattatataaaataaagtacaatttccacttaattcagtcttcaaatattttttattggaaggccatgcattgccttcatttattgtatttcaaatcactgtacatttacttttgtgaaaacactgcctgcattttctagtacaaaaaaaacctaaaaattgtttcaggaatgtagagaaatatccaacttaaatagcgaaaaagtgcaccataattactgctgcactgcagtcatttctgcaattcccatgtttcttaaataactatcttgtcagataacacacaatataaagagcaattatgaaaaacagacatttacatatacttctaaagtcttattgggaatatcctgttggcattggataaccaatcataggtgcagctgcagtagcaggatatgcatatgcctgttggttcataccattgtgcatatttggaacattacttccgtattgctgagtgctatcataaccattctggtaagtccctgttggattaccagtcctaaaactggtctgtataccagcagacacaaaattacttccaaagctcccattggtgtaatttgcagcactgtaaacaccattctgagtttttgccccaaaatctcttttaagcaggctagagtaacctctgtcataattttccctgtctctaaaggtattaaatccaccccttttgcccgcagagtatctgtcccgacggtcatccttcatgcctcctctacccctggaacgacctgtcaagaaaacaattgcaaattgatcaattatgtctatgacacaaatcattgtggacagaaagaaacagatctattcatggtaggcgtgaaatgtttttacaatttttcagcttaagttttcacattcaaggttttactcaccctccaataccatttaaatggatttgtagacaacgatgtgactcgtaactaccaacatttcctatcagtcatccttacctgaacctctgtcttcgaccaactgaagcaacttgggattaattgcttgattagcttcacgaagcacagagataaggtcgctcacttgctttatgttattaggtgtaaagaaagtgtatgctgtgcctgttttggtactgcgagcagttcttccaattcgatgaatataatcctctgaggagttagggtagtcataattgatgacaaatttcacatcttccacatctgtaaggtgttgcagtgtggcaaaatagcaatgtacggagttttgcacaccacaacagccagaccaaaaataaaaagttagacaattgtattcccaagaaggtacgggctgcaaaaaatacagttaaaatggttatccatttcctgtaggaataccattgaggttgaaaaaagaaaaaaaagcacatgtcatctgtataattcatcacccacccagtgacagaccctgtcaaaaggaatgtgtgttccctaagcacattcccaaatcagcaagttcccttacagatcatcaagtgacatctgaatgcttctgcgcagtagggccacttaaagtttcacagcaacctcttcatgtgctcattttgaggaccttgaaacaaaaaaatgtacaaggtcctttgcattacacattcatcagaagttcaaaattctggccacactgcttgtcttgccaagaccttacaaccgcagctgcaagaaaacatacctgtcccccaaaagttgtttttatgcactgtgtctcgtctaggcaagcgcttccaagaagccaggattcacttgagaatgtgtctctctctggcaggtctcgacatgacgactactgtgtaggtgagggaggaactttcaaagcactttcttttcccacttactatgtgtgagaagttgctcctgctctagatctcatgtgccagtactcaccaatttgtaaaaggcttagtaccttttaaagctgctctctccatttcaaacttgaacaaaaatttcattgaacattgaagtttggaactacttcttcgacatttcagcaaactcactgaaactcaaagacccacagatcacagtgaacagtttgaaacaaggctgtaccatggcagtcatgcaaagcatgggacagaagaaataccacggcagtgaactgtgaggataacttccattttttccctcggagagaacagtttacggggcagaggtgatatgttctgccttttgaagattactggcacacgttcagctttttcacctctctaatcgactggaagcagccagccgatcactagtcctccatccccctcgagtcctccgattgtcatgcctaggccttgccacaaagacagcacctttatgtgaaaaaaaacttagaaaaaatgcaggttaaagaaagcaataaactttctttaaaaaagttaaatggagatcttctgggaaaccaagccatgaatgcgagtttgtactaacctagccctctggaggccacatctgtagcaatcagaataggagcttttccatgtttgaattctacaaaggaaggcatatacatgatcaattatctgagcagaattctagctaggttaagtaagggggaaaaatacttcatttgaaatatttaccatttagaacccagtcacgctcttgttgactcttgtcaccatggatacccatggcaggccacctaagttaaaagacaagttgtgttattaaactcacattgaaaacctcagactccagtgcttgaccacttttggtcacagatctctttaatttcgccagaaatgaaaaagttaaattcactatcagatatgaaaaaaatccactgctcgtgatccaagtttgccctttcctaagctgttttaatcaatctgcttcaatggaggagctcacacatacccatctctcctcatttttctggtaagctcatcacatcttcttttggtttccacaaaaacaatggttttattctccttctcactcatgatctcttccattagacgaataagtctaataataggagagagaaaggaaaaatcctgagttttaaaagaccattgctagggccacacatttatggtcagcaaaacattaagttcaatttacatggctggaagtcaaagaggaaacgcctgctaatccacttatcgagcagttcgacccttggtccttaagtcaaccaggggacacatgaattccttctataggaaagctataaatggtgacagccattatttgaaggattcaagaaattttcaggattagtaggctaactaaatgaaatcacaccaactgaaataacctaaaacaactcaccaaacaatgatccctcaattttacagcaaagttgttaggaagcaaatataacagagttaataaaacttacttttcatccttttctacgtcatgacacacatccacaatctgaagaatgttgtggtttgcactcagttcaagtgcaccaatgtttatatgaatatagtctttcaggaaatcttcagcaagctgtcttacttcttttggccaagtcgcactccacattagagtttgcctatcaggctaatggattttggggggaaaaattagtatcagactcttaagagtgaaaacacaattcagtttgatcacatatttcaaaggacacttactcttatttgatccacaatcttccttatttggggttcaaagcccatatcaagcattctatctgcttcatcaaggacaaggtaggttgttcttctcagattggtttttccacactctaaaaagtcaatcagtcttccaggtgttgcaatacagatttccacacctttaattaaatacgtaagtgtaactacaatacctaggatatttagcaccaatgacaaataaaacccttttcattacatacctctctccaaatcacgtatttgtggtcccttaggagcaccaccgtagatacaagtagacttcaagcgacatgctctacaatattcagcagctacttgctgcacctgttgggccagttcccgagttggtgccagcaccaaacactaaggaaagagaaacagctttcagcacaaacctggatactagttttaaactgctaacttattatactagcagatcctttcttcatgtgttgtccaatacccaaaacagctccagctgaatagggtgagctaacctctatataaaaccaccacaaatgattacatctttagctatgtagtctaaaatctacacattatgcttctaataaaaagttaaaaatatatacttacaataggcccatcgcctctctctaggaatggctgatgattgatgtggacaatggcaggaagcaaatactatttagggtgaaagtggggacaaacagaaatcacattaaaatactcgtttttaaattaccattacattttcttgcatatatcagatcaactcaagagttctcccaaacttacagacaatgttttcccagatccagtctgtgccactccaaccatatccaatccacttagagcaactggccatccctgagcttgaatagcagtgggttcagtgaaattctgtcttgcaataacatccatgacatttgctataattagtaacagatatttagtaaaaattagtgatgccaagaaaaagagggggtaggtggaaacaaaaacacgggtaggtagaactgaaaagtagcacttaccagggaaattggcttcataaaaatttagaactggcttcgggcagttgtgacctctaactgtaatttccttgcttcttctgtatgtttccacctcttgctgcaaaacaaattataacagtcttaaaattcatgacaaccacccctagctaaatacgtaattgataagcccctaacttcataatttagtaactagtttaaagtagccttcattttaatctggacccacctatgaacaccctattatgaaaaaaaaaatttattgttatactcaacctaatttaagtaaaaatcccaaagccacctatatccaaaagtgagtcacacctttcccaattatgaagtcagaacatgtaactctaccaaaattgagttatttgcaaaacacctgtcagaatttcatttactagaatccacgatcgagttacagcctgatgaagccacatgaatttactcactgctgtgcgcctagccaaatcagggtgctcttgataaaaattcttctcaaatttaggcagctcatcaagattccacttctttttaactaatttctccccagggtttccaaacttctttccagataagggccctgccctacttcctccaaatcgaggtgcaccaaacctggaatgaaaaaaaacgttattcacattttcaaatggctatacccaggtttctgtatagatttgtcatccattggcacaagctaaaaaccactgaaaacagacttcgagaggtaaacctagcactgtccttcgtgaaaatctctctctctctcaacagccacagttaacatttcccgtagtcccaagtacacattacttaggtcatgtaaacagcctgggatttatcatgtcggaagccggggatttatcatgtcggaaacttgtcacccacatgccagaatttgggattctggcacacaccacttcttgtggttactgtaatcttccccaccagcctagcaattcactatcagcaataacaaggctacatgaaccgaagagcatcacgacgatgttactcatatggccgttttggaaccaaacagctttagtggtaagaacctaaacagtacagtcagcgataacagaacaagggttttctcagaaacacttctgctagcaaacccagctgggggaacgccgcggtagagctccggatcaacgaatcaaaattatataacgcaggaaaaaagaaaaggaggagccggcgactaccgggggaggagtcccggcccgggcggagtcggccgggcggcgttcccgctggggcggcgcttccccctttgtctcgcatttctctctgcgccacattttctcgacgctgccattttgagctcctccgccgggcggggtaacaaaggcgccgccgccatgtccgaggccggcattttgtactcgcgactcagccacatggctgatgccggccgccctcctaccccaacagcaccagggctttggaagtggtcccctcgctcccacagaatgcccggccaccccaaaaacacctcccgaaacgccgcacctaacagatgttccttcgtctgcctcgaagcgtcccgctttcatccgcacaatacgctccctctcaactccctcaacagctaccaaatggcagccgccccgacagctccccaatccccacacaaaaagcaagcttgaagacactacaccgtcaaatctcttccaatcactgtgacgtgaatatcaaaatggcgcaagccttcgggaaaggaagtcccaagatagcccggaaaggccaagtccaagccgcaaagcccccgccggccgccaccctgacccgccctcccatccccccacccgccaggcctgacagctcggctcccaaactcaccctcggtcccggccgcggtctcggtcactcgaataacccgacatggcgtcaatggttgcggttggcggggaacgaagtatatagaaaagcgtgcgacaagtcgctggaaatggcctcgatgacggcgaagccttgcgggggcggcagcggaggaaggacaccgatgacaccagccgaagctgcactactagagaccggtagaaatgaatgaggtgccggccgctttccggcagccgcttttatagtctggaccgcctcctacgccgcagggaacgctgggagccgctctatgacctaatcgccccgcccctcgcgcataggccgcaacgcccgctggcgttccaggatcgccgcgctttcacccctccccgcgccactctctcaggtcagggcccacccaccattggaatgcctcattctgcactctcttgacctcaccttcttctggtctttccacacctcaagcaagccaccccgccctttcccaagcccagccccgcccaccctcgccactcggagatgtttacgtctccaaagagccctcacgtctgtaaccaaaagagggggaaggcggggcctggcgttgtcacgtggctgtaccaccccggaccaccgagagagcggtccgcactactttcccgttgacgtcggcggagggatacaaaacgaaatagctcaccggaagtgcgctgctcgcaccccgggacccgcccgggctgccggctgatgtggaccgtccgacccgcgtgtctgataatcctttgacgggttttggtcggcggagaatggtctctaaacttcccaaaccgcccccgtttcacgtcctgtgaaaggaagtgctcctctgatgaccaatcagcggcgagaagctcttttaacgtccgtccttctttcacgcctccttccccgcgctttggttcgtgcgtccgcgccccagtgtcgggtctgcgtggatcggtccttccaggacaccgtcgccttcccggccgcgtcggagtccggcggcgacctgcctctgaaacatggcaggctcggatgctggtgagtgtctccctggggtcccagtatgtgtggactgaaaccgtccacctccagggaggcctcgggctagcccggactgggtctgggctgtcggcggggctcgtgaccttcagacgccgcgtcgcgctggcgggttccctggatagggtctctcagcttcaccacctcttcgcttcgaggccgtggaacagcagtatgctgtgggagagagagaggcactggggcgaggccggtaggacacttgggtcctggctgtaaaaagagcggtcagaagggtcgtccccggacttgtctttctgtggggcgtctagccgctgtccgtgtgccctccgcccttgcactatgggccctgaggtcgtacctgcttttgtattggtctttaaaggaacagcattcttaagatttattatgcccctgcagaatagtagaatatgcccctgtagaatagttgtgcttttttctcttcagtgccctctagagtcatgggctttgtctagcaccgcttttgaagagcgaattaatttggttgtctaggacgctttcatccttttcacaaggactgcgtacaaaccagttgtcatggtttggccagctgtgagaaatgggcgtggggagggggattatgtgcatggaaaatacactctcattcgtttccagaacgttacgtgtccagaacatagtggagatgtttgtttctaataccgattgaaagtgctttcctaccaattcccaggcatttcaaggaacaagtattttaagctaagttacttttggtacagaaaccgttaaactttgcaaatcccagcaatatctaggggagaggagaatgtggtacgcaggaaacgtcaacagtattgataattctgagcttcatgtacttcccatattttctttcatatagatcgatataataaaaaagaaaaactaacaaatgcattaccgttgatgttgttattataccagttcttaacagcctaagtttaatcaccactttttccggcaccagagaaaccctgacttgcacaagataattgggtaaacacaagaccaatactattgcaagtgcgaagcagcctccattaatgagtttctggtaacctcggattatcattaaactgttgtttatgacataatattcctgtttacttgtaaatatgttttaactaaaaacacccatgtaaggcttatataagtaacttaagattttaggctgcaacagtatcaattgaatttgcagtatagttttgactatgtagaaattacagcactctggaaatcatcccaagaaattaaatacatctttttaaaaaccatgcctaaagggtctttgaaattctctaacaatcaaattccttatcttctgcaaagttcagtgtctgtttttgttgggggggaggttgttggattttttaaatgtctgtgtgatttttttctggtggtttttaagactgatctttccccctttttcccaacagagtgggtaaccattgccaataaccttctttttaagtgtcatatacatctgagaatacatgaacttcaagactgtgatgctaatgtttttattgctctttatcagtctattttgggagaaaaggtaccaggtaagaatactaaaagcaggagtaattttgcctatatcttaggccaaaagtttttagtcctttagttagattctttgatatttataaaatttcattttctctttgcttgtttctttttttaatattgcatattaaattctatattaatatacaatattaaaataaatattgtatattaaattgtatttaatatcacatattgtataattataatattgtattccttaaggaataccctgtggaacccactcataataacggccttgagcagatcagtttgagggctcctgataatcacggcttaacctaatcatggctactgccttgtgaaagttgcatcttttctgtaaatgtaccttcaaaggttgtaaaattgagtggagcttgggaatttattggattctgttacttaaccagtgctagggataagaattgatgcttgtagatgatgaacctcatttaccaagacagttaataagcgcatatgtcctttcatcttgctcaccatctcactatgttcaagaccagggtggtaccaactcagcttaagtgatcctcccgtctacctcccaaagtgataggattacaggcatgagccaccacgtccagcctgtgctgaccttttaaatctttataccaataattctagttggctattcaaaaggacatataagggccaggcgcggtggctcacacctctaatcccattaccttgggaggctcatcacttgaggcaggtggatcacctgaggccaggagttcaataccagcctggccaatatggcaaaatgccatctctgctaaaaatacaaaaattagccaggcatagtggtgcacgcctataaacccagctacttgggaggctgaggcaagagaattgcttgagccgggaaagtggaggttgtagtgagccaagatcacgccactgcattccagcctgggcgatagagcgagaccctgtctcaataaataataaataaacatacatatgtgtatatataagaacgctccttgaatgcctgctgtgttttttttttcttcgtagaaagtagcccatagttatgggttaaagtatcatgtcttggctcccttattagactattagctgtctttgaatttagggaccactttatcttccttaacatggtgcttcttgtaaagcatattcatgtatatctatatatctatatatatatatatggtgtaataaatattcaaccgtattcaaccagtctaatattgataaatcggttcaatcaataaatactcaaccagtaaagattctgctgtgtagagttcagggtttattaactttatctgtactttacagcatgttctgtttgggcagagcctttatagcagttgagcatattcagtagcctagtcagagacaatgagatgaaaacttggcctctcatggatacaaaattatgtgattttttccccccccagacctcatagttattcctaggagtcaagaagatgatgcacacaatgtacaagcagtaattgattcactggccttggactacttgcaggtcagcttgtctcacataacaggttggtatatgtataactatcacataattatgcattttagtaaaaataattgttagaactgtagacattgtttacttaaccaaatgagtgagcttatggagtagaccaaattgtaagattgagctaagacaatcaactgatagaggtcaggtccatacatgagaacttttccaggagagctgaacattgattttgcaattgatctgggtctgaaacgtaaatatcctagctggtaatttgaggtgtgttttttgtttttatgttatgttgttttatttatttttattttttgattcagagtctctgttgcccaggctggagtgcagtggtgcaatcacagctcactgcagcctcaacctcccaagctcaggtgatcctctcacctcagcctcccgggtagccggggctacaggtgtgcaccaccatgcctggctaattttttctattttttgtaaagacaagagtttcgccatttgcccaggctggtctggaactcctgggctcagctgatccacctggctccactcgtgaaattgctgggattacaggcctggaccactgtgcctggccttcggggaacctgccccgatagtcacgtaggttcttttctattttatctaagcatcggcaggtttgagaaataaagggacagagtacaaaagagagaaattttaaagctgggcgtctgggggagacatcacatgtctgtaggttccgtgatgccccacaagctgcaaaaaccagcaagtttttattagggattttcaaaaggggagggagtatacgaataggttgtgggtcacagacatcaagtacttcacaaggtaatagaatatcacaaggcaaatggaggcagggcgagatcacaggaccacctgactggggtgaaattaaaattgctaatgaagttttgggcaccattgtcattgataacatcttatcaggagacagggttttgagagcaacctgtctgaccaaaatttattaggcgggaatttcttcttcctaataagcctgggagcgatatgggagactgaggtctatttcagccctacagtctacagaccataaaagatggccacgcccgggggaccgtctgtagacctgcccccaggcgtgtattctctttcccagggatgttccttgctgagaaaaagaattcagcgatatttctcccatttgcttttgaaagaaaagaaatatggctctgttccgcccggctcaccaacggacagagtttaaggttatctgtcttattccctgaacaattgctgttatcctgttctttttttcaaggtgcccagatttcatattgttcaaacacacatgctctacaattttgtgcagttaacgcaattatcacgtggtcctgaggctacatacatcctcctcggtttacaagatgacaggattaagagattaaagtgaagacaggcctaggaaatcacaagggtattgattggggaagtgataagtgtccatgaaatctttacaattcatgttcagagattgcagtaaagacaggcataagaagttataaaagtattaatttggggaactaataaatgtccatgaaatcttcacaatccacgttcttctgccatggcttcagccggtccctctgtttggggtccctgacttctcgcaacacctggccgtattgttttattttaaagcatactaatgctacttgtttgtgatagctaaaaattagaaacacctaaatgtccattagtagggattggttagataaatcatgatagctgcatacagtggactgctctgtggctgtaaaagatgactgaatatgctctttgtgcacaatgttccgtgttgggaacaatctctagcatatgtgatgcgagaaaaatgtagtacaattataatggtaatgtgcagagtagtatgctagtgtttgtaaaaacaaaggtgtgcagaagtatttgcagttgtttgcaatcggaagaactctctagaagcatatacaagaaactcgtaatactgattgcttccaacaaagggaacctcagggttgcaggacaaagggacaagaactttcagtgtatactttttgcacttgctgaattttgaaccatgttatctattcagaagtttttttctgtaattaaatctccaaaataaagtatactatactgtattctaaaactaagcataccaaatatatttataaatcactgtattatgtgtatttcatttatgtttagaaatgaatgattattccagtaagttatttcaagcttatgaatagagggaatattgacaatgtgaaactataatcacaaaaagaggatttatactgttgatttattctttgatagttgtaaaaggagataaatgttaatcaggataagtcctgatttacatctcttaatttgatactgacaagaacaaatttttgcgaagagaataaaatactcttctgtcttaagttttttaatgcagttctaggtgagtgaatgggtaaatcagttcggagataatttgagggctactcccatagtttccctcttttttttgcaatttgtaattgctttatcacccaagtaggacaagttctggtatttgtgcttgttaaacatactatagcagggttataaacatacatgtttgtaaaactctttaatgcagagctgtctttgacagattacacccaccctatgaaaaattgtaaaacagtttctcctgcagcatgaagcactgcattctggctggcagtcttagttgctaggttgtcagtatactccccatcctagaaactgaaaagttttgaggatgctcttgggatatacttaggtatttttaagccggaaaaacacgtccaaaaccaagatttctggttcattgttttaaacgaaaaaactcaaacgttgtcgttactagtagtagtataaaacgtcaaatttctggtttaggtttgttttgcatcatggctgaggttacgaatggctagattctcccaaatgtcaaatttctacactgcttttcccatattggtgtgaactcatgagaatgccaggcatgatctcccaaaggacaatcagagtgtcacaagggttaagtactatctatacctgaggttgatttggagtccatttcaggtgacattaaatatgtcaagtttccatgctttttgccaacccatttctattcaacatttcaacctaatcatttatattaaaaatctgttacggagtaggtactgtgctagggactgtgctatgatctatgagtgtaagttatgaatatgaagtggatatggtaagagatgtagctggagacgctgaagatggagtgagatttaaaaaggttttatatgcagggcttatatttcagaaagggagccagggaaaggattttaatcagaaaaatggtatgatctatacaaaatgaggagttaacaaatatggggggttatggtggagaattcaggaatttctgatgaaagtatcccaacaagtttattgtttttttttgttgttttgatgttactctgctgctataatcttctgaacaaaccaccatttagaataggataccacaatctgaaagtgttctctcctgccactttttcccaccaatctggtaaagttctgtttagctgcaatatattttggtataaatcttactagacatgttttcttaagtccaattattttgcttctccaaaaaaggaaggaatatgccagtgaattattagacgccatatttaaagcttccccctttttttcttcaaatataatcaggcagcaggaaattgttgttcttaatatttataattgtttcacctgtattcttttttttatttaatctccaaggagctgtaagttggtatgtatcgcctgtattcttaaatagcattttcacaatgttatatccaagtttcaagattatgaagctttcagatttcatggttaaattttttaatagctctatattctgtctccaggagaaaatatagtgaaaggagataaagaatctattaagaatctcctggaaatatttgatggtttgttggagtatcttacagaacgcatcagtgaaacatctcatgagaaaagtaagtttaagaatggaaatttggtttggtttaccttttatgatgtgtcccttttgccttttatctttttgtgtatttttcttcataggaagcagattcactaatacagtatacctgataaccgtagttgtaaatttcaaattcttattgttccagctggttggaaactgtcttagactgtcatcatgttctttatcaacttggatgttgctcataaattacttcaaaactaatttatactagaaagataaatttctggctaaattatttattgtcctatgattgcataaaatttctttctccaaaatttcgtgtgtcagaactgctatttatggtaaatatttggatgttactgaggcatcaacaggaagaattggtgcatttgtgtctttagcctgcacttacatttgtgacagcctaaatatttcagatatttgtcattgcaaaaagtgaaagaacttaactgtcttaataatttgagattaagtaaataatgctgttggtcacgaatggaataatatattacctgttcttatgttgaaaagttatcaaaaataaactttcagcagcaaccacaatttacataaattcgaatacaaattaagacaaaaaattggggtaggctcatcctccattctcactttgtttatagtgagacctgtgatagtcacatttgaaattaatcttaaagtctttagttagagatagtttcctacctttaatcattgttactaaactgtttaaaaactgggagggaaaattgaaaagtctgccacactggacatttctttgtttcaaaaattgagtgttttataggcgtctgggtactctgggaggattccaagctgcttgtcatgttgatactctcaaacctgtacttgagtcagggagacagccataactacatacaataaaagcataaagggggaattagaactaggggagagtattgacaggtgggactcacctaattcaaggctaccagtaggtatttgtatgctgtgtacctttctagtctttttagtaacagggttaagaggtagaaaacaacctctaagtaaagagattgagattaatttgaaatgtaaagagagcagcagttttttacagtttagtgcttgctcgcaggaaggggagggatggtagtgcctggctaatgatatggcagtggggatgaagagaggaggaggcaactgagagatacttttatgtgagtctggtggtggtgaaagactgaaggatattcccaggggagatcggcagtatgtggtgagctactggggaagttgctcagataggcttccctatatgacagtaccttagctggacagcattttcttacagtctgcttctcatctttgcaggtctaatatatacttacctggcaatatttcctagagctgatcaggttcttcaaaatgccagttaacagtaatgggaaacaaatctttattatcactaatcatatcagctgtgcagggcagcttcaacctgggacctgagctagcattatcatttaccactgaagaaggaggggttcgaaggaagaccatgggttcagtgctgggttcttcctctcactatatgatggcagctctctaagcctgttttctcatctgaaattctttcatggttgttgtgaaagttaagtaagtagatgtgtgtaaacagttgggcacacagcctagctcagagtaaatgcataataaatgttaattgatgttattgaaatgttgcttggtgaatatggaagtagaaaaaaatgaaggtgggtgtttgaatggtgaatctctagacatgggcatgagaatatccaaaggggtaaatctgaatcatgggaggtttcacctacatgtattttgaaattatttccctagtgagttatagctactggtgaaagtatgtattcttcaagtatggtggggtggaaaaagactgatggtcttaagaaaaatttcatccaagccctgatacagcctgactcagcctaaggcatgattatcttggagcttgcattatgttgacacaatcacgttttctgtcaccttgatatacctcagacatcctttacagatggagaggtataaaaatattgaatggacctgccactgacttaaaaaataaaacattgctcatacaactgtagaccctgtttttaaagcaatattcttgtttctttgttactcgaataatacatgctcattacaggtgatttggttctttctgattgcactttcactagaaccctgtttaccatggcaagttaggggtgcctcactgtccttacctttccctgcctcttacatagaaaaagtagtattcacttaggggttttttggtattgtttttatctgttctgaacaggtgaaactgaacagtattttaaagaatctgatcgaggagaacgtttggaagagccagaaagtactaaagaatctaaatcatcatggaaaagagtttcttttgggaggtagcacttagtgtctctgaatttgatgaaaacaagttacgctttttggactaagaattaaaatcacacgtaatataccaagatggcaccaaaaaaagctaatgtgaaacttctactaacttctcatattttaaactttcctgagggagttttaagaaccttgagttacatataatacctaaatctcagtatcaactatctactcatttttatatttttctttttttttcttttttgagacggagtctcattctgttgcccaggctggagtgtggtggcatgatctcgactcactgcaaactctgcttcccaggttcaagggattctcctgcctcagcctcctgagtagctgggattacaggcacgcgccaccatgcccggctaatttttatatttttagtagagatggggtttcaccatgttggtcaggctggcctcgaactcctgatctcaggtgatccacctgccttgtcctcccaaagtgctgggattacaggcatgagccaccgcgcctggtccctgtttttctcttaatcatcaaagtacgtcatcatctttgcaaaaaacttgcaaaatagaaaaagcaggaaaaaaaatctattccgaactaaataactgctgttaacattttgttaaattttttagtcctttttactatttttttcttttttggatttagtcatatgtctatataatttcgttgcctgcccctcacccctgcttttttaataaagagacagggtcttgctctgacactcatggtggagtacagtggcgtgatcagagttcactgtagccttgaactcctgagcttaagcccaagtagctgggaccacaggtgtgcgccaccacacctggctaatttttttttttttttttttttttaacagagatggcatcttgctatattgaccaggctggtcttgaattcctggcctcaagcgatcctcctgctgcagcctcccagagtgctgggattataggcatgacccacctcaccaggctcgtttcctgcatttttaaacttaacattaagtgttctcaagttgtttaattttttttttgagacacagtcttgctgtgtcacacaggctggagtgtgcagtggcacaatctcagcttactgcaacctctgcctcccggtttcgagtgattcttgtgcctcagcctcctgagtagctgggactacaggtgcacgccgccacggctggctaatttttgtatctttagtaaaggtgagttttcaccgtgttggcaaggctggtcttgaactcctgacctcaagtgatccgcctgcctcagcctcccaaagtggtgggattacaggcgtgagcccctgcgcccagcctcaagttgttaaattctttataataatttgtaatcactgtataacatcattcatgtggatgcttcataaattactaagccattcctctaaagtagagagtttttttaaatattatcaaaaacgtgatacttaatgtttattctttttttcctcatatcttgaggctagattcagagtaagacagtgtaaatgttttaaggctaataataaaagttgccagactgttttccaaaaaggccatgactgtacatttaccaacagtatagcaatgctgggttacaggaccttcatgagccagtatcattgatcattttcacagtttttaaacttgtgcttctttcatagacaaaaatgtattgtcatgacaggtttgattgcacttcttgctaactagaggttgagcataatgctatgtcttcatggttcgaagagcacaggcaatgccttcttttttaggtatagtacattgtaaaaaatgtgtctcagaggagaccatcataagatgaaatttttttttttttgagacagagttttgctcttgttgcccaggctggagtgcagtggtgcaatctcggctcactgcaacctctgcctcccaggttcaagcagttctcccgcctcagcctccaaagtagctgggattacaggcgcctgccaccacgtccagctaattttttgtatttttagtagagatggggtttcactatgttggccaggctggtcgcaaaccctgacctcaggcaatccacctatgtctgcctcccaaagtgctaggattacaggtgtgagctaccatgcccggcctgatgaacttctttccataagaattttaaagtaacaaaataagcgcaaaagtgaaacaattgaaggatatttaatgcaaagttagcatcccacccccttcactcccacaccctagagtcaccagtatttgctgttctcctatacatttaatcgttgacactttatatacagctatttctaccattcatatatcagtgaaaacaaaacataagcagcaagacatgctaagcagcaaaagggagagtcttttcctttttctgcacccagcagctctccaggtcctcaggggaagggccctctggtcaggctgggccctgagtgaaggagggaacttttccaggtgctccttgtcttctgagatgttgggcccctcttgggatggagatgaagcagaatccactggtgaaatcattagacttggagacacagcacacaccttttctctaagaagtaatggtgagtagttaaacctgaagtatcagttattattcaacatacaactataaaaatgtaaatggtatgtaggagtgtttaaaattgagaagaatagagtgctaactggacatgggatttgaaattccagaatatcccactacccattaaatatgaacacttatctgaagtcgcaggcatatgggcagataagtccaaggcaaataagtgtatgcaaggttattaggtaatttgcggttccttataacctgggaagagaattatggatgcagcttatagtctggtcacgctttcagggtattctttaattgtagtttcctgaactggtggttgactcacttttttcattgtttgaaccaataagttcgtatatgcagtagcaatttttcttctaggcttcaggccagatttccaacagcctattgcttgcacatagtagacccggatatctttcaagccccaattttgagcctccaaccttgccctcctccaatcatcctactccatcctgtccaccgtggcttcataaattactaaaccagtatatggaccacaagtcttggaatgttctcccttacttttggttcctggcaaactcaccctccagtagaccaaaaagctatgcttgccattgggataggcacagaaacggaaggaccagagtcaagtgtggatactacaaaaatgtttcttgaagtaggagaatcagatggattgattgggaatggaagggatggtgattgcagaaacgggttctgtgatgtcaagtgctatgtaaaaaagatgttactgtaaaatgaattacttattttaacattataagtagagaggggaattgtgtttaagagtaatgcaattaaggcaaaggaaaaaagattcagagagatgcctggccaaggtgtttgggtttgatgtgataaaagggcttatggcagcttcctttcatattgagatttaaagtgtcagataactgtcatatacattcacaggcatctaatttaagcttcaatatatggaccatagtctttttttttttttttttttgacactaggtcttgctctgtcacccagggtggagtgcggtggcgcaatctcggctcactgcaacctctgcctcagcctctcaagcggctgggattacaagtatgtgccacatgcccagctgatttttgtatttttagtagagatggggtttcgccatattggctaagctggtcttgaactaataacctcaagtgatctgcctgccttggcctcccaaagtactgagattacaggtatgagccactgcgcttggcctggaccatgagtccatgtttctggtactagctaagaccctaactctggtgtctattcataccaagacatgtccataaaacagccagcatttccgtaactctggcatctatttttctaaagctaaataatgaaacattgtatgaaactttgcttttaaattgtataaatgattctggattacaaaatggcatcttactttctgatagcaattaaaaataattgatattatggcccgtcacagtggctcacgcctgtaatcccagtactttgggaggctgaggtgggcggatcacctgaggtaggagttcgagaccagcctggccaacatagtgaaaccctgtcacaatacaaaaaattagccaggcatggtggcgggtgcctgtagtcccagctactctggaggctgaggcaggagaattgcttgaacctggaaggtggaggttgcagtgcagcgagatcacgccattgcactgcagcctggcgacaagagggaaatgctgtctgaaaaagaaaaataataattggtattttgagcagttggaccaacattatttcgttcaacattatttaatatttgtttcctgagtacaaaactcttggcttttagtataatgttcagcaaactattttgatagttaaaaattttacctttaatattttctttcctaggtgctcaatgtcctaatgaaatgctgtctaaaaaagccttagcctcaccaagttctaaatcacatgaagatatgttgtaccctcctagtgttttgtccaagagtaggacatcctttgttgaagacagtgagttgtaatggatgttagttctttactgctgatgatcattcttggggcaattgttgttgccattagcctttttacttttattgctgtatatgagatcctttttggtcttacatgatcttacttgtaaatgtttgctattaattatggtatctgaattctgcttaacatggtctttggttgcatatttttgcatccactattttattatctaaattctcaccacttaccttttttttttaatgggacagagtctctgacacattagtacatctattggtggtcttcatattattggtaaataacaaagtatagtaactggaaaaacattctttttttattgtttcgagacagagtctagctctgttgcccaggctggagtgcagtggcatgatctcggctcactgcaacctccgcctcctgggttcaagcgattctcctgcctcagcctcccaagtagctgggattataggcgcttgctaccacgcccagctaacttatttttagtagagatggggtttcaccatgttggccaggctggtctcgaactcatgacctcgtgatccgcctgcctcagcctcccaaattgctgagattacaagcgtgagctcccgcacccggcctggaaaaatcattcttgtttcttattatcatctctggaattttcatatggtagtaatacataaaaatattactgcctaactggttttgtaacgtggacgaaccataattcacataacataacattcttcaagccatttaagttgcttccagtttttaaagtaactttcagggaacagttttatgataataacattaaaattacatccggggccagtcatggtagttcacacttgtaatcccagcactttgggaggccgaggcaggaggatcacttgagcccaggagttggagaccagcctgggcaacatagcgagacctcatctctactttttttaaaaattaaaaaaaaaaaattacatcctaatttaattagatccctgtgtgctgaggctatatccctggtttaattatttttttatgtgctttgtcttaagtttaaaaaatatttctaatgtatgtgaacatgtttatataggtatgtatgtatgtatataaaatggtttatttcttagaattgcatcgtaatatccactttaatttgtcttactagcggaaaccctttctgtgagtgggattccaaatgctaggaagctaggggagcctatccgagcagctattcctttacatccaccctaccacccttcagagcctcgagcaccctgccccataggaaaagaatacttgcattcaagtcactgctccccagccgtaaattctactggagagcatacggaattttctggggtaagtggaaaagcttactttcagttggctagaagtacacttgtatgtatgtctgtgtgtgtgttggtaattgattagaaggccgtgtgtgtgtatgtgtattggtgaagtctttattctttgtcaaggaagcccctatatttaaagaagtctgctagaattgtcaagcatattgcactagtcaaagcatcgtactccttaaaatttgcctctgtatacacctgcacattcttgttctaggaagataggagaaaaacgaatgcatataaagggaaataataagagccaacacatagtgaatgtttatgttgtgccaggcgcagttctggatactttaggggtattgaataatttactgcccataacaactctggagtagctactatatttatttattgttgggaagctgatgtagagagggcaaggttacacagcaattacagagtcaggatttgaacttggacattctggcttcagagtccatattgtgtccgtaatttaataatttcaaatttagaaaacacagagtggaaaagaaaataaccatccatgcatattcccattatccaccatgaaccactgttaacatattgatctatttggttcaattgcagtgagccaagatcacgccactgcgctccagcctgggtgacagagtaagacttcatctcaaaaaaaaaaaagaaaaaaccttttttatatagtcatcctgtccttatctttctaaaaagaacaggactgggttcggtggctcacacccataatcccagcactttgggaggctcatgtgagtgccagagtttgagaccaccctgggaaacatagtgagaccttgtctctgctaaaaatagaaaattagcctggagtggtggtgcatgcctgtgatcttagctacttagtaggctgaggcaggaggatcacttgagcccaggagcttcagtgagctgtgaccacaccactgcattccagcctgggcagcagagcaagaccctgtctcaaaaagaaaaaaataaaataagaaaaacaacaggcaggtatgtacacagggtagatatataaacagtgatacattttcattatttaaacattcaagcaatgcattaaaagtacagagatgaaataagcattattaacaataggtgaccacattctcaacattctgtgcatctaaacaggagagggattagataaaaagaggtgttaaaatggagtcataagataatgtttacttttgggggaatcatagtgggggttttagagatatttctgagttggtaatactctgtttcttgacctgggtggcagttaaaggggagtgtttattttcaaataattcattgagctagaaatactttattttaaaagttttattaaaatatgattatattttagttgctatttagtaaaaggttgtttgttttatttttttttgagacagagtgtcgctgtgtcgcccaggctggagtgtagtggtgcagtctgcacccactgcaacctccacctcccaggcaagtgattctcctgcctcagcctcccaagtagctgggactacaggcacacgtgccaccacacctggctgattttttttaaaaatatttttagtagagacggggttttgccatgttggccaggctggtctcaaactcctggcctcacctgcctgcctctgcttcccagattgctgagattataggcatgaatcaccatacccagcctactaaagggtatttaattttactttaatagaaaaagataatgaagtgaaattaaagatatcattaaacattaaataaatggccgggtgcggtggctcacacctgtaatcccagcactttgagaggctgaggtgggtggatcacgaggtcaggagttcaagaccagcctggccaagatggtgaaaccctgtctctactgaaaatacaaaaattagccaggcgcggtggcaggtgcctgtaatcccagctactctggaggctgagtcaggagaattgcttgaacccaggaggtggaggttgcagtgacccaagactgcaccactgcactccagcctgggtgacagtaagaccccatctcaaaaaacaaaaaaacaaacaaacattaaatgtttcttcatcacaagaagtattttctaaaagattatctctaagaccaagaaataaatttagccggacacggtagctcatgcctgtaatcccagcactttgagaggctgaggcgggtggatcactcgaggtcaggagttcgagaccagcctggccaacatgcgaaacaccgtctttactaaaaatacacaaaaaaattagccaggtgttgtggcatatacctgtaatcccagctactagggaggctgaggcaggagaatcgcttgaacctgggaggcggatcaagccattgcactccagcctaggcaacagaggaaaactgtctcaaaaaaaaaaggaaatttaaaatgttaagggtttatattcatattttgagaggtgttgtctttgttttaactgtttcaattttggacagcctttattgacattgatacaaaagatagccacttgaatactttgtactagtgataatttttttgttgctcaggtatagtggtaatccctgaaatttcatatttagagaacacctggcctgtgtttttatttgaatggcatcctgagccacatttgttctctgagcacaagtttctagacattgctccagtcctttggtgcactgggtgtcaatagggtcttttgacaaatgcacttcaaaacacggagattgaaggcacgtagctttgtgccacagttcctcccttcctcactcccagaaagttcatgtttcttatttgtagctttttcaaatcaactttttttctgtttttaataggatctagatgatggacttttcttaatttccaagttgcctaaaggcagcaaatgggaagtatatccagctcaggtccaagggcctaggacaaggaagcctcccaaaggaaaaaggtaacattactgcagacttcagtgtttacagtctgtttacaaaggaatttgaaaatgcaggggcatgatctccaaatttagctgtgaagaccagaatgaagtatttgttaaagtacgtattacagttattttaaactaaataatagacacctagctattttactgtcaaatggtcacttttattacagaaatgaaaacagagctacagcctcatcctgcaattcacctttcccccagaggccaagaaagagattaacagaacaagaattacatgatgtatcagaaaaactctctcagcggctttctgaactagattgggcaagtcttgttttttcatctatattgagattcccatgggttaagtgagcatttaagtaatctctcaattgaaagtgaggtattagaaaattagttgtgtcttattaatagttactgtgaaaatgttccgtaagtcaagcaggtagaacaggaagtgatctctcagcgtttcatgatctaactaaatttggtgcagatttatccaaattttattgaattctgatgaaaactaaatcatttaacataaacgattatgttaagccatttttctttagatatgtctttatagttcccctttgccgctaaagacagatctggtataaaattggatggatcactgattctcacaaaatacaatattacagttttaaggtatcattgaatgaatgttttaaatccctacgtgactttttctaaagtttattgaaacttagtgatccatagcactgatatacacctttttaaaactaaacatgtatgccaggtgtggtggctcacaactgtaattccaacactttgagaggctgaggcaggtggatcacttaagcccaggagtttgagaccagcctgggcaacatggcaaaaccccatctctacaaaaaataaaagattagccaggcttggtggcatatgcctgtaatcccagctactcaagtggttgagatgggaggatcactggaacccagtaggcagaggttacagtgagcccagctagcaccactgcactccagcctgggtgacagagtgagatcctgtctcaaaataaaagtaaataattaaacatgcataagcgtctgaaaacttgttattagtgactgtcaaaggaagcttttttaaaggtctgcctactcctacgaatttacattctgctgaaatcagtgaaagatgttgaaaagaattttctcaatagatgttaaaaagtgctctgggtgatcggattaaagaaaagactgaccataaagaagaaaatactggaaatgaggaggtagaggatggaactgaggagacactgtctcagcacagtgatggcatcgtggagtatgggccaaagaagtcaaggccaggtacttaccccagagagactgagaagggggacatccatgtgaactacttaggcagttccatctgttcttaataacttatattctaattttaaatagttgagaaatatataaaaggatcaaaagtaatatcaaacacctggatcttccccatctagaagtagcaagtgttaacaattatatttgctttagcccctttgtgtttaagaaataaaacagtagaaaccccctctgctctccccacagatctcttttccccaccctcagtgcaaccactgtcttaaagttggcatcttttcttctgatccttgtttttatactttaagagctcatgcattacttgtctaaacatagtattgttttatgttgtttaaaaatttacatactgtatatattattctgcaacttgcgtttttttctgacattgtcttagaaatctatttatgttgatccttacagatccagctcattcattttaactgcagtgtaactgagttcttacagtgtgtcacttttgtgtgggtatatgtatagcagtatccatttcccctactgctggacatgactgagttcttgcagtgtgccacttaatgtgtgtgtgtgtgtgtgtatatatatatatatatatatacacacacacacacacgcgtgtagcactatctatttcccctattgctggacatgttgtttccagttttcattactataaaaattctgcaatgaacagcctagaatatgtgtaagagtttctgtgatatctccatctagtaggattgctggatcataaggcctacatttcttcaccactgccaacttgcccaccaaagtgattgcactgctttatactcgtatcagcagtttctggtttgccgtgtctttgcagatacttctactgtttgatatgccattgttcaaatccaattatcctgtcttccaccaactaaaatcctgcatattttacatttagttttatctactttggtcatccattgtttcttcagaaatagtctttttctgatccaacttccttaactttttcagttgttttttactccttcaagaatgctctttccttctcttgattatttcctctctcttccctttaaaaggactcagctaatttctaggcaccctcatccaggaacctcttcctttccctttttatgtacatacacatggtatcctattgtgaaaacaggttataaattaaaatattatttcaagtgcgtcttcagtttctagagaaaaatacatcatgagcagctatcatttaaaatagattatgcaagtcagtttttaaaaatacatcttagaatttgaaatgtgaaagacttgaattaaaagcatgtgaaaaaaataataagctcggaaaatttatttataaaggtaccaaactagcttccttggtcttaaggctatgttgaagtgcttttcccactggagtcaccctcttcacaactagcagatccccagacacacctatagacaatgggataaaaaggtttgtagaaggaaatggtttattagatctctttggcagtgtgcaattaggagggctagattgctaagtagggaaaaattgagaccacttagacaatgcttaacacattaactttgcctataagcatatataataagatagatatgtatgcttacatcccaccttctcaggacccagataggtaaaaggatagcagatgcgtggctcagataatttaccttttctctctttgcatctccccctatcaccaagagcactctccatagtcctttgtgcataggaggcattccacatgttgaatatccaaagttgaatgtagaagctaagtatttgagacagtacacatttgtatgcatttgtctgtttacttggtgttaccataccaattcaagttagttacaggagagagtccctttagcacattcactcatcagtctctttggatttagtgaaaaccaactttggtttccagcataacattctggctatcaggaactaatgttatatgtcttttctctgttgcaggactttccatgcgtagaaagccaccctacagatcccattcgctctctccatctccagttaacaaacacaaacagttccacttggagagaaaaaggcagcgcaagccaagagaaacagatgtccgccaattccaagcacaggttcttccccatctcttgactaccattaagcagcagccagtaccatttcccctcagccagatgctaccatgaacatgctgttgatttaggcttaaaatacatttaatattcttgagcggagtggatgatagagagctatgtgacatagcttatgtctttgttagcataaaattatactcatgaaactcttaaaaaaaataacctggctggacatagcttggtgttccagtagattaagaaagaggagatcagtgtgagttgttattttcagagtgagcttcagagatgaagggaatttgaggtggattaaacgtgaaaggccacttgagttacagagaagatgagatcaagtacccaagacaggaatgagaggaggtggttgggattcaacaacagggagattggtatgattacctaggaagactttccactgtggaatgtggattttgaaatgtagcatggatttagaacacttatttgcagtagtaggttttataatgcggtaggatttataatggtgaaaaactaaaaccaattcagacatcttacactcatttgtaactcagcatgtaacttccactcaggagagtatcaaaatgattgcaaaaacttgagaacagaaaaaacgcatgatgtaaaatttcattttatgtcccaattatatatgttaaagtaatgtagagatttgtgaggcaggtgcagtggccctgcactttgggagggtgagacaggtggatcacctgaggtcgggagttcgagaccagcctggccaacatgttgaaaccccatctctactaaaaatacaaaaattagccaggcatggcagtgcacacctgtagtcccagctactcaggaggctgaggcaggagaatcacttgaactcgggaagtggaggttgcagtgagctgagtttgtgccactgcctccagcctgggcgagagtgcgactgtctcaaaaaacaaaacaagaaaaccatacatttgtgatatagagtctgaaaggaatttttttaaaaagtgaatgagcttgatattttaggggtggcaggtatcctaggtgaatttttttcctcttttgtattttttttttttttttctcaaggtggagattcactcttgccgcccaggctggagtgcaatggcataatcttggcttacctcaacctccgtttcccgggttcaagcgattctcctgcctcagcctcccgaatagctgggattacaggcatgtgccaccacgcccagctaattttgtatttttagtagagatggggtttctccatgttggtcaggctggtcttgaactcctgacctcaggtgatccacctgtctcatcctcaccgcacgcggctaagagcttggatgctcggttgaggcaccattggaattgaaactcaggatctcctgtttactagacaggtgctttaaccagctaagccatggtgctgcccgttgtgtatgtttttaataactgtaatatatgaccttttcccctttaggcgtttactgaagcatttgaaagggaactaagaagacataaagttcaagagaatattggacctctaagaatacatgagaaggaggaggaaacagtgggtaaaagtctccactgtaataaatgccatttgatcagatgagtgggaagtacaaagatgatctttttaaaagaagaaggggccaacagggccttaatcatgagctctttaggaaaaggcaggatttcatgtcatgatacaggacttgcttattaataaggcattcaggttgctaaaatatgacgagacatggttccaaagaaaagtagtgtttttccgctacttaaaacttcccatcagtttttaagggtttatttgacttagcagttcaccaggggcttaaaaactactctaggctgacaaaattaaagaagagtaagagaagacagaacatcctagttggctatagacctggttgtaagaaacccaaaacagaagttttcattgcctttcaaaagaatggttacagaaactaagtgaaatcatggggaaaatgcttatgctaaaatattcatgaacaaaacaggatataaagtacagtatggttacaactaagcatactgcatagttgcctgagaattttttaaatctacatggaaaaagagaagtacattgaaacattaatggttaaaaaaaagattaatagtggttgtatttagggtgtgggactatggtgactgaaacttgaaaaagattcagtgctttttcaaattccaagggatgccagaggccaaaaggtgcatttaacttagagtaaatgaatattaaccagattttacaaatttgaagtaaggtggtttggcttactgttagctaaaaaactaaaaaactaccgttagctgtttttgtcagtatgtaatatttaagatgatgtatgaaagaactgttagaccttttatttttattctgttttatatctgcttctaaggaaaaaatatacagaggagaagctgttcgtaaaggaactccagaatgtagtcagccctggaagatttactctagaaaaaccacaacgcagagtctaagaggtggcctcccaaagccaaataaagcagttccaagtaagaaccacagaattgtactttatggaaaactggcaacctttgaaagcatgtgcaacattccaaggacacagcactgaaagctaacatccaccagttagccgaagaaagttttttttttttcccaatcactgccatgtggctggttttccgtagagggctaaaactcttcaataaggaagtacttcagggaggcctatatattggcacccaaggaatgccaggactgccacctgctgctccagcgttagcctcactcgtgtgcttactcactttgactgcctttttgtctatttctgggaggttggtagaatgaaagggatgctccaaggcaagcagatggcctgtccacctcctatatattgacagtgccaatgagtgtagagtcttgttacaagaaacaaagtcatgagaaatgccaggcttcctgttacacccaaagactgctggccctcctactctatcctttagaccagaaactttttcttctaagcacttgcctaccgggaaggttgaggagtcttgttttaccgtacgtagagaatctacccacaggcactgaagcggctgagcaattaggatggacttcccaggaccagcatggcatcaatccagaactattgagcttatttttatccttaccagtagttggcttactccaatcagaggagtaatgcaaattattataagtacatttagaattgttcttttcaggatcaaaaccacatcacttacataagctttgatctaccagggatgttggatgacagttcttgtccacgtctcagattaagaacatcttattttaccttgcagtgaaagtaagtgaacacagtctcctgccccttatgctggagcagtttccgtttctttatgtttctggcccaacactaagcaaaatgtggaaacagcaaattgcacaggttgaacagcttaagaaagaagcatgtagagaaaatcgatcaaagaagaaactccaagatgaagtaagttactgtcagtcttaagcataggaatttaaatgagaagagcttatccttaagaatttagtgaacagcattattaacctacttaacttcatgtcccccttcaagatagaagaagccctaagaaggcatgacctccttactacccttgtcaagaaagaatatgaacataacaagagactggtatgtcaagagcaagttgggtattataattctgaatttgttatattcattccctttatctgtgctagctgggcaacagttgcacagacccttaacctcttaacacctgcatgtggaagtgttgcctaggtctttaaccaaaattgatagcccatgcctgtaatcccagcactttgggaggctgaggtgagaggatcacttgagaccagcctcagcaacatagtgggaccctgtcattaaaaatatatatatgggtgtggaaaaaatgagcctggcatggtggcatttgcctgtggtcccagctacttgggaggctgaagtgggaggatcacttgaacgtgggagggcgaggctgcagtgagctatgatcttgccactgcactccagcctgggtgccagagtgagaccctgtctcaacaacaacaaaacacacaaacccaaaatgggcaggaggaagagctaggtactttatatacacagtttcagttagtcttcatagtaatgtattagagatgttttctatgaaatgaaaaccctgaagctttgagatactaagtaacttgccctgggtctcactgataagcaagggacacagctgagattttaatccagttctgtctgtggactccatggacccatctaggtgccaagcagctgaacttagtgctgtttgccctctcccatccttctcaggtcccaagtagagagctccaggatttatcagcctccgttataattttgactaggaattgtgcttagagaattacgaagggagaggatggaggtcagaaacaatctgccaaagggagagatttaaaaatctttgcctgagtgtggagtagagataagccatgagaactgtaatactgaacagttccaggaagacatctcaggaactgcagatggtactttcctgtggagggaaaaaacactagtatctgaaacacctacataagaggctttatgtacatgaccccattttattttcactcctttgtcagatactgtctaatttccttagtttttgcctaaatgctcctggcagctcaggctctgcttgaaagtctgggtgtgccattttcctactccttgtgaggtggcatctgggccagccttgttagcagcttcctggtggcatggggagtgagccctcagttccacaggagtgcccaggatcactgctgccctctgctgcagtggggtgttattggagctgctcttcagattgaggtgataaagctgccaaaggctgaagggcttctggggccactggccccccacacgtgacatactgcctgaagacatcgtgatggggagtgaggcagatgagaacgctggaatctgcattcctcttgtccttacccttctcttccctcccctttccctttcttagcaagacttcaaggactgcattcgtaggcaaaggttgacccaatcaaagataaaagaaaatcgacagcaaatcgttcgtgctcgaaaatattatgatgattatagagttcagttgtgtgcaaaaatgatgagaatgaggacccgggaagaaatggtaagtctgacttttctgtccagccctgttaagaaggtgaactttgttatctttcaggaccaccttctttgttcgtgactcttgtccaaatttgaatccaaaatctaaactgaagtcctatagtgctggccctgagttctgcttggccacacttcattttcttactccattgtgcattcccgtccattctcagtctccgtgtccctcatcttaatgtgaagtcttacttcctccctgcctcctacacataacaggtacttctccagtaaaactactttagaggtttgggaacatgtgagagacaaatttagtgtgataacatgaccttgcattccacataaaatcaggactagtgtccagctgtgctgtgaggggttttccacaaggatgacatttgctatgtcatcctaatcaggctgtgaaatgattaaccttttgagatcccaagctagcaataaatttcatctgtaaaatattttagtaattatagtttactaaagacttggacatatttctagaggaaggctttgaggagagcgtaagtaacttgtctgtagctcatgaatgcgtcgccgtcagaaccagtttttctatccagaatttacactgatgaagggaggacaagtgcgcatatccaagccctttgagcagtgtgttttccggtggcctccccaaatgatcactccccctcctcagtgatgtacatgtgtaggtgtggcatgtttctgctcttggcgttcttaccctatgtacatggctgcttgacactgcttttctgaaggttgtaaagaacctctgtgatacatgaaaagataatgaacaccttcgtcattagggaaatacgactcagaaccacagttagaggacgagtgttggcaaggatgtggagaacttggggctgtaaaatggtgcagctgctttggaaaacaatctagcagttcctcagaaggttaccaaaaggtcatatagagttaccctatgacccagcaatttcactcctagctatataatcacacaaaaaacacaaatgttcatagcattacttataatagcctaaaaggggaaacaacccaaagtgtccatcagttaatgaatggataaagagtgtgcattcattcatacagtaggatgttacttggcaataaaaaggaatgaagtattcatacatactgcagtatagatgaaccttgaaaacatgcggagtgaaagaaaccaaatacgaaaggccacgaattacatgattccatttttaggaagtgtccagaatatgcaaatccatggagacagaaagtacagactggtgactgctaaggatgggacagggggaatgagcactagtcagtatacggtttctttttggggtggtaaaaatgttctgtagtggtgatggttgcacaactgagtataataaaacatactgaattatttattttaaaagggtaaggctggactcagtggctcacgcctgtaatcccagcactttgggaagctgaggtgcaaggattgcttgggaccagcctgggcaacatagtgagacgtcatctctccaaaaaattaaaaatttagccaggcgtggtggcacatgcctatagtcccagctatttgggtagccaaggtgggagaattgcttgagcctgggaggtcaaggctgcagtgagttgtgactgccccactacactccagcctgggtgacagagcaataacctgtctcagaaaaaggaggtacattttatggtatgtcaaaacatctgaataaaactagtatttaaaaaaaaaaaaccttgggaaatacaatcagtatatacctctagttggccaaaatgatattcctcaatgactatttttacgattaaataactgacagatatttaagaaactgtttgaagaaggtttaaacattcaaaagcaaagattacgagacctaagaaactatgccaaagaaaagcgagatgaacaaaggagacgccaccaggatgaactggactccatggagaactactataaggaccaggtgggctcctggcacttgcttacgctgttgtgcttagtcctgaccacttgcccttgtggcaaaacttgcttagtctgttgacaataaaccttgtgttaactgaagtttgcactctacagattagaggaccccatttcaagattgaaatttaagatcaaataatacctgaccatagtacagtatatttccctatttccattaaaatgattttaagcctgtgaacattaagaaatgttacatttggactacaaacattaaatataatatttgttttttttcttcctataaacagttttcattgctggcagaagccatatcacaggaacatcaagaacttaaagccagagagaaatctcaggcccaggtaataattaagatagaagccaagtcatgcactgcatggcaatgtttctttcagcaagggacctcgtacattggtggttggagcaataggctgtatcatatagccccggtgtgcagtggactgtactctctaggtttgtgtaagtacactgacattttgcacaacaacaaaatcatttaatgatgcatttcttggaacatatctccatcattaagtgacacatgactaatttacatttttaggaagtagaaaaccaaatgtattatacctgtaaagggaatggagagaagactaataaggcaatccatctatgacccaagacatttttatcctatgattttaactttagttaggtctctgtaagagctgctgttgctagattattgaaaattttggaggagtttgattagctggaagatggagagggaacaatagatgagggcctggataaatgctgtgaacagcgggatgacatgccttcttttttcagacattacataaggtgaagagggagctgagatctaagatggagaaggaaattcagcagctgcaggacatgataacacagaatgatgatgatgttttcttccgggaactggaagctgagcgcttcagatctcggcttcagctggcttcctttcagtacagtaaaagtccctccctatgaggccagacttgataatagtaggtgaaggttctggaggcctttaccaggacagagctagaatcgagccagtaaacagtctaagccagaaaaataattttcaaatgctttacctgtattttcattccagtactttttatgattttttaaataaaaattgttttctaaaagcttattgcttttgaatttatgacctgacacctgaaaaggggaaaataatcattagtcgtatttgtgctaaagcaagtaacaagccttgtgtgagcagccagctcctgaagtttgttgctttaagtcaacaaaaataattaattaagaattagcacttgaggacaaaaaaatactatattatttctgattcatgagagaagaaaggtgggtggttatcagaggtgggcctcggagaaccttgacaataccatgtatgtgtagacttcataacatggctggacgatgagagactatgcattacggcagttgggtgcagaggctcatgcctataatcccagcactttgggaggctgaggcgggtggatcacttgaggtcaggagttcgaaaccagcttggccaaacctggtttccctggtttagtacagagatggtgaaaccctgtctgtactaaaaatacaaaaattagctaggcatggtggcactcagctgaggcatgagaatcgcttgaacttgggaggtggaggttgcagtgagctgagattgcaccactgcactccagcctgggcaacaaaagtgagactctttctcaaaaaaataataaaaaatgcattatggtttctgttggttggcagaagatagatagatagatagatagcagtgagaagagatagatagataaagggtggaaagccaggctgtcattcaaagacgcattagtgacttgaggtgggaaggaggcatgatgatgggtttcaagtgggcaagagtgcaccagcctcatatctggtatggaggaatacgaggaaaaaaaacccacttgggggcggcgtcatcaatgaaaagggaaggctacacttcttttaagctagaggaagcttcagagcagttgaggatatggggacttggaagccagggagtggcagagagaggcttccattagagcatagagagtgctgtgcggatgagtgtatgtatgatgagaggccaggaggcctgaagcagtgaaaactgacctagagagaagacatctggatcaactgctgtggttccaagtgctgagctcttggaatggaaactggcagaagggtgggccaccaggcaggcgggagcttccagcggggaaaggcttgatggactgggtgtgtctggagcacagtaaatgacatacagacccctgtgatgtgttgtgacaattcagcaagcacaggtgaatggaaaggacaggaaatgcacaagatgaggctagatacgcaagagctggaacataagttctaaaaaatgttaagcagaagataaagtagatctagatagccataaaatactgagtaaaaaagttttagactacaaaatacgcagttttatagaaaaaaacatggtatgagtgggtattatacatatgatgcaatataaatatgatacagaaaagatccggaagcatggcagatgtgactcttgagtggtagattatataataccattagatctgttaacacaagcctaacgatgcttttattatgatttttttttaaatgtaaaatattttaggaagactgaagttgctagttctggtgattggtgggaactggtgctctttaccaagctaaaaagtaaccaggaataaacaacaagagaaagaatttatgagagaattggtcagggaaggaataggattgctcagcaaaggtcagaaaataggagacaacatatttttgaaaaatcaaaagcaaataaagatcacttcaccagactagcttagcaagcagaggacagtgcgattcaagtgctgtggattgtgtgcatcaagccagtcagcgtggagcagcccaggaaagattcatcacagtcatgcatttggaaagtcctgtggggggtgttacagagtgaggtgcttggtattagaactaaatgcctcatctatcataagggactaaccagacaatatttaaaattaatgaaaagccctgcctggccaacattagtgaaaccccatctctactaaaaatataaaaattagccgggcatggtggcgcataccctgtaatcccagctacttgggaggctgaggcatgagaatcgcttgaacctgggaggtggaggttgcagtgagctgagattgtaccactgcactctagcctgggcaatggagcaagactcctaccaaaaaaaaaagcattaagaatacttaagtggggaggagaaacatcttaggttcccttgccaatcccacagactgcaccacagcgtggtggtgctcacctgtagtcccagccacttgggaggctggcataggatcaacgtgagcccaggagtttcaggctacagtgcaccatgactgcgcctgtgaaatagctactgcactccagcctggacaacacagtgagaccacaaacacacattcaagtctgggattcagggccttgctgaggtgggtatttactcatgtgctcccatcatgactgactttgctgtacataaattgagctttgagcacttaagtttgaacttggcccacagtgagacacagactagaagcatgactttggaagttcactttctaaccaccatgcaaagctatatggctatcagctagtacagagcctggcatgtagcaggagcatagtaaatatttgttgaatgagcagcagacaagtcacatttagggcagataccttttaagtaaaatttaaaatctggtctgtctagtttgctacgaatgttaacataggaatgtaaagtaacacttctcctgcgtgattacctcctttatcctgttactaggctcttgttctgttgcatatatcttattgtgtgtatatatatatatatatatatatatatatagtaagcatttggtatatgaagtacaaatcaatgcagtgggtaacatggttaaccttcattacaatgaagggacaaacttcaggttaaacttctgatcattagtcaaatcaaacttggataatttgtagactattataatactaaaaaacaaaaaattgtttttgagacaaggaaggtctcagtctgttgcccaggttggagtacagtggctcaatcatggctcactgcagcctcggcctcccagggctcaaacaatccccccatctcagccccacctccagtagctgggactatcagccacgtgccactgcgcccagctagttttcatattgtttgtagagatggggtttcgccatgttgcctaggctggtctcaagctaggctcaagagattcacctgctttggcttcccaaagtgctgggattacaagcgcaagccacagcacctggcctaattttttttttttcttttcctgagacagagtcttgctctgttgtccaggtcggaatgcagtggcgtgattttggctcactgcaacctctgcctcctgggttcaactgattctcctgcctcagcctcccaagtagctgggattacaggcgtccactaccacacctggctaatttttgtatttttagtaaagagacggggtttcaccatgttggccaggctagtcttgaactcctgacctcgtgatccgcccatctcagcctcccagagtgctgggattacaggcgcgagccactgcacccggccaaaaatctttaatgtactaaaactttataaattttagataaaaccagtaaacacagcaatgagggacaaagcaaaacaaaaatattcaaaagaatattaaagcatataaacaaaagcatgctcaccctttgaactttaatacactgctactacttacacatttcccaggtgttcccttctgttgtaccctatgctgtgtagacttacacagaccatattcattccttttctatccatagagttagctggactttagtccactatcattaatacagtagtgaattataaaccttaaaatccacagcttctagaaaaaatacaattgatttctccttttcattttgagaattttactgctcgacataccaaggtagggctggcaaatatgagcccctgtcataggcctgccctacagagcggagatgtattatagcaaagatggttgcagactggtgacaggaccaagatgctcttccccactagcccctgacccccctcagaaatccacctatgcggtacccccaacaggtactaccaactgagcagtcaccacggccggagaaaacgggcaccttccctgctctgcgaggagacagaaagctgagctctgcaacatgacagaggcatcaactcaggatggcatgtgttcttgaacttttcattttgtgactcatgttgtcaccctccatagagccaaccataaatgttttcaaaacgattcattacaaactcaatattctttaaaaacgttgatgctgtgacagtgcaaacagcattgattttattgctcgacttcggcatgggcacatacatagttaatttttaaaaaccatttatacagatgttactgataaagctcatgtaacaaatgaatgaaaatacaaagaatatcaaagctaaaacactctgtaataaatacaaatacaatgaaaatgataaaactttgtttttaaagtcagtctgagagaagaatattacataaagtgaactaattacatctagaaataaaacaactcagcatttggaacaatcatcctaacatgttaaataccacaaatggcacccgttgactgtacgcttagaaaacaagcagaaggagccactctcccaaactaaggatggttggaacagcctctaactcccaacaatccaatcagtccaatgcactggaaattcaaagcccagatttagtgttgtaaagtaaagcgaattacattgtatttgaaagaagagaatcttgtgctccggactgtaaatacatgaaagaaaaaaaggcttggtaaaaaacccattcggggcaacaaactatgtgcaaaacaaaatgtacactatacactatacactatgcactatttaaaaactacaccaagatacaaggccctctgaggcaagacttacctctctgtactgcctatgagctctacaaaggaatctctgttcataactaagcattcatgatggaaaggcaagagtatgaaaacagatatcacatatctgaaataacaatacagctagagggaagacaagaaaaaaccagttaagagggacatggaaataaatattcacattaaacatgaggtgcaagtccatggttcaataatacattgggggtttttgcttagcacctatttggaagtaatcgggtaatgtaactttgaaatggaaatctaaatcatgtttttatatatgttggtgataacatagactgttatggagagtaatttcttttttttttttttttgggcggggacggagtctcactcttgtcgcccaggctggagtgcagtggtgcgatctcggctcactgcaatctctgcctcccagattcaagcaattctcctgcctcagcctcccaagtagttggattacaggagtgcgccaccatgcccggctaaattttgtatttttagtagagacagggtttcaccacgttggccaggctggtctcgaactcctgacctcaggtgatccgcccacctcggcctcccaaagtgctgggattacaggtgtgagccaccatgcccagccaatttctttcttttaaagctctattaagtcattagtataaagttaaaaaggcactcaaaaagcaatggtatttgcctgctttatattgtatattaaaataagtgatagtagcatttcattattactgtatccctgtcagttatgatttctgtattcattatgtacttttttactgaaagattttaaaagtaggcacaattataaactgcactagtgctttaatataaaagagagatgggtctgcaaccagtaaagtactatcatgacagctgaacattactgattatcaaatagcatagaaaccacttccatacatttcaagatgctcttcagtactcagaatgcaatgtaaaaaaaacaaattgtttgagaggaaaaaggtaggcataagcatattaccactgcacagttacaactatgactagcttgcttgtggcagttgaatttggccaaatgaaatacattaaaatacttaaaaactacacaagtagttctcaacttttttaaagcagcaaaatctccactttttttatcccatccattcctccccgccccactgcaccccatgaaagcttacttgaaattccaatatacataagaaaaatgggctgttctgggtaaagggggtggggatatggagcctaaggcccctgctcaaataccaactaggccttccccctcgctccctctcattgcccctcttctcttaaaccattactcctgaggcacccctgaggaaccctttggctccaagaacacagactgaaacccactccatcacatgaaacagaacacagaggacctatttacttgataactttaaattttgcagcttaattatcatgaaaatttgcttatttcacatcaatgtaaaaaaaaactgatagtacatatttttgatggttgaatttaaaaatccaactgtgatttcagattttttcaatccctcaccccagagttttcgttgcttctggatcattcaacatgcacgcaccttgaaagctaaatctggacgtttcaaaatcagatgcagatcttcaacaccaagggaagcgggattcccttacttccaaaatgaactcttcaaagtaatttacgccatagagttagaatcactgttcatactaccgcccctcaaccccacttcattctgttaggtaaaagcaggattttctaagcttattaataatctttagagcaaaattcttcctttttcataactgtagctgattaaaattatgagcagttaacgctttaggatggttttgttaatggaaacttacactgtagttaaaatacaatataaattaggtgcacttgtcagagactttggtttataggaatagtccatatattaaagataagctgacccagcaaaataacgaaaatcccatcccatccacatgctctgagaagctataaaaatgcagtattttaagattaaaagtaaatccaaaatacctaatcatattgactcaagataaaaacattaggtttttttttttttaaaagagtctcttaaaaacagggagcccctgaacacatcttattgtcacaaataaatgactaagtttagactaaatggttgcattaggaatttgacaaccaaaattatatcgctgtattccaggaaatccgttcttgaaaaatgtaaaaaagacccacttagactaggttgaaacatataatgcaaaatataatgctctgctatagaaaaacacaaacatgtaaatggcttaatttcttaaagatgattcttttagccaattgtttacaaaggtagaataattcaaaataattttatttttttttacaaagagcaagtacaggagctgttcaagatcatgtattcaatcaaaatgaaatgtgacttgtaccgactgctgaagttgtcttgatgtttgagagacttgaaatctgtgaagaaatttgaatagattaccttttataaaaatagtagtagtctttaagtgtagaatactgcctaactctggaaatgtaggaaaagtcagcattctttaggttcaagatattaagtttaaatagcagctgaatgtggcctcatggcaaagcataaagaccttttttttccttgaaaaggaatttcaaaattgtcctttcccctcacagtgtcctaaaatgtaaaaaaaaaaaaaaaaagggggggggggggagtgttttcctgtatttcagcatattctttgaaactctgctgaaaggaggctgtcagtcagggttgtataaatagagtcctgggtaaatccttgaagcttgtcattccacagcaaatccacatgtttcttcaatggctgttagcagcttttcatatagcttttcatagctttcatagggtggaatgtctattcgattgaagctgtgaataagcaaatcaaattttatacagttcattcaaaataagtaaactggcctagcaagtgtataccagtatagccacatcactctgtgtcacacagaaaactaaaaggtatttctctaaaacagagatgaccacttttgggttttcctaccaatttccgaataatcttaacttttaaatcacttaagttgcttatcattccctttaaaggcccatttaacactagtaagtacaataaataaaaagtcaaatctgtttggaactaacacttatgtacatggaatggggaatacagctacaaaaataccttaccaagtgtgggctttcggcaggttgttagtgcaggcatcaatctggtgtatggtaaagagtctcgggcctgcagcacctgcaaatgaaggaaatgtggatgaaatcactgcaggtgcgtgcattagtctccaaaatcttaagaataaaactggtaagttaaccacaggatctggggataggggaatgctaatgaatccacacatactaccaaagggcagcaggaaaagcatctgggttttaagagccagaattaaccttggataaggcttagattccgtaataggttcacatttccatttgagaaaaaactcaagattgaaatccctttctcaatttctatcttttatagaaagtcaatatcccaaaagcatgagaagaaaagtaatcaggcaaatccaaggtaaaatacataggcacacattcaaaaagatgacgacctgatgcaaatttagatttcatgactcaaactgggctgacagcaaaagagccgtctatagaatccatttcagttcgcacaggcaccccatataaatacatgtagcagaaatacaacttcactttatgcatctgggaagtgtgaggatgaggagctctccttacagagaagggcagcacagctgaaagcacgctctccccccagggatttcagcgcatgcgctgtgggcagcactgtcgaattatgtaccagtgtcgctttgtgtgtccttattcatcaccagcagctttgaaaatgaagtgcttaagaggtaaaggaagcaactgccacccagtgaagcaccacaatcattagcaatattaccagctcctcccaaaattaaccagcttattccacagaaaaccattcttaaaaaaggaatatggttgtaaacaaatggtctgatgccatgcagtaattaaaatgctctgaccgaacagatggtttccatgacccatgctgcttctgtctaataagagaaagaacgaaaagtagaggggagaggcatcccaggcaggtaaacgtttcaccaggtcaagatgtgaacatggaagtgaacgacttccctacaggaatgtgcaacagaattaaaagtaaggtgaccagaaaacaaaggcagagcatcaccacgtacggtctctagcatgcggcactcactacaatcagagaagcccgcagaaaaggctcttgggaagggaacaaaagaaaggagggagaagaaggtatcacaatgtgagagtcacagataagaagtgaaaaagagaatctctaagcacatggtttacaaaatatctccacagaccccacgctgacagccccgcccccacccgctgcccagcttgcctgcacctcaggctgttaccttgcaatgctttgaagccctgcagaggcactcgagaggatcctgtcacaaactgaagcaatcttgctcgtcgctcttcatcaaaaaactccacagctttccagaaccatttgacaatgttgctgtctggtgtacagtgttttaaccgggtgtttaccttccagtcattaacatctatctttccaagtccacaaataatgagctgtgaaaatagtacacagtaatgaacctgtggaaaccacagccagaccaaaaattcctcaaaagagaactttaggtttgtactgctggctgtcatttggtggttcctaattaaagatgcacatcagaatcatctgaaaagcttttcaaattgacattccaggtcctaggctcagagatgttaattctgtgcacctggggtgacagttgggatctatattttaaaaagctccagagatatctactcactgcaaactccctctccagggtctgagaaccacagctgtgatagacttgaccaggtaaacaattgagaatgtttcataagttcataataaaattataaagctttaaaaaaaatggacagaaattgagacccaaagagtaaatacagatatgtgccttctttggacctgcatcatctactagtttcaatacctattagctttgttgattgagggcaattcaatcaattcctctgctgtaatatggtagtaacatccatttcactacatcctggggaagcaaccgataatgcacagaaacttcagaaatgggtgttgaataagtgagtcatacaatttgcttaataattttttttttttaagacagaattttgctctgtctcctaggctggagtgcagtggcatgatctaggctcactgcaacctctgcctcccgggttcaagtgattctcctgccttagcctcccaagtagctgggattacaggcatgcaccacaatgcccagctaatttttgtatttttagtagagatgagattccgccatgttggccaggctggtctccaactcctggcctcaagtgatccgcctgcctcagcctcccaaagtgctaggattataggtgtgagccactacacctggcctacatttgcttaataatattaaattgatattaaagcacaaaatacatgagcacattgatacagacctctgctaaacacatcctgatggagggtcacacagatgaactatatccaaatcattttatactatcattaatatgtctccctagggttcaagactaactcaccatactaatctaacatgtttgtttatagcagtgaattccatgtatactataaaacataacttgcaaatcctgtattttatagaattacacccaggattaatatatacaatgctaaaataaatgttatacatattgtctttaaaaattggtagggtgtggtagctcacgcctgtaatcctagcactttgggaggacgaggcatgcagatcacttgaggtcaggagttcaagaccagcctggccaacatggcgaaaccctgtatctactaaaaatacaaaaaggtagccgggcgtggtggcgggcacctgtaatcccaggtaaggcatgagaatcgcttgaacccaggaagtagaggttgtagggagctgagatcccatcagcctgggggacaagtgagactgtgtctccaaaaaaaaaaaaaaaaaaaaaaaaagccaaaataatgttagccaggcgtggtggtgcacacctgtagtaccagttactggggagactgaggtaggaggatcacttcagcataagagttaacagtgagctaggatcatggtactgcactccagcctaggcaacagagtgagactctatctcaaaaaataaaaataaaaagtttaatgattcaggcctggtgcagtggctcacgcctgtaatcctaacaatttgggaagcagaggcaggtggattgcctgagctaaaaagttcaagaccggcctgggcaacatggtgaaaccccatctctactaaaaatacaaaaattagccaggcatggtggtgcacacctgaagtcccagttactcaggaggctgaggcacgagaatcgcttgaaaacctgggaggcagaggttgcggtaagtggagattgtgccactgtactccagcctgggtgacagagtgagattctgtctccacaaataaaaaaaagaaaaaagagaagaaaaacaaagtttcatgacccattagcagtagaaactatattaaaaatcctaaccctaccaaataaagtctccagtaaggcttctatggggttctgaaataaaatctccaacaaagcttctacagggttcactgaattaacaccacactgaacagggaggaggttatccgaaaaggattatgggtgtatttaatgacataaaagacacctcctaaattcttttcttcagaggaatggcagttagaaggccaaatcctcgtttattgtataaagagatgaaaatgcattatatttcaaccttatcggcattcctgctatgttctccttctaactacttccttctggctatttcactatgaacaattcaatcacaaaaggaatggggagagtattaagtaaaaccaacctttttagatttgtttgctaacaggtctattaacagatttatttagaaaggacattgaaggcattgaataaaatcatgtttcaaattattagtagacttcaaatatttgtgttatccctaactactaaataaatttgggacctttaatagaattaaacctcgtgttttttagttgttcagtaggaaattcagatgcatttgtttaaggtcttaattacaaaacctggggtgtttaagggccagctttaaaaggaaacaaaaaactattcactgtttagtatggccgttaatctaaagacatttagaggccaggtgcggtggctcacacctgtaatcccagcactgtggaaggccgaggtgggtggattatttgaggtcaggagtcccaggccagcctggccaacatggtgaaaccccgtttctactaaaaatacaaaaattagctggacgtggtggcaggtgcctgtagtcccagctacttgggaggctgaggcaggagaatcacttgaatccaggaggtggaggttgcagtgccactgccctccagcctgggcaactctgtctccaaaaaaaaaaaaaaaaaaaagagagagacatttagattcaatttatcctaggtgttttagttattttctcgatgatcttgtctatcaaatgctttcttgcaagcttagtgtaaaactaattcagagtaggctcttacccaaataaatttcaaaatggtagattaatgaggttttacttaactaaatcagtaaccactaagttagggaatagacatatattggaagaatgtacatataagtcacgaaatctgtttaaaacaagaaagtacaggatagaaaaataaattaaaaattttcacaatataagagagactgctcacagctgggcatggtggctcaagcctataatcctagcactttgggaggccaaggcaggcggatcacttgagctcaggagtttgagaccaccctgggaaacatggcaaaaccctgtctctaccaaaaaaaacaaaaaaattagccaggggtgctggtgcatgcttgtagtctcagctacttgaggggctgaaggatcatttgagcccaggaggtcaaggctgcagtgagccatgattgcaccactgcaccccagcctgggtgacagagtgagaccctgtctcagaaaaaaaaaaagagagagagagacagattgttcactcacagaaattccaaagcatgaaaggccttcaaaagcatgaaagacttttcctgtgaataagaattctcaagcatagaaccatgaaacttagaaagcaccagaaatatgctttcctctaaaactaagtaacaaaataattcccaatccttccttgttacactagtgatgttataatactaatgcactaacctctaactccttctcatcaaatgtcttcagcagatgttgtggaattacttcattaaatcctttctgcagagccaagaattgagcctcaatgcctcgtaaaaatctccagttcacatagagcctgtaaacattcggcaggatttcgtataatcacatgtattttcagatctggtaattattattataaatctctactttagcaacaccgcatcttacaagcatctaacattaacggtttagcctcaagtctaacaataaatctcagactaatggggataaatgaaccctgaggtgtgacacagttcaatgttgatgaaaagtggtaaactactaacaaaagcagcatcagcagagcaacccttcaaatcagagaagctcccaggaaacaggacgtctactagagctgagtcttgatgaaatttctttctaaacttacagcatacatgccaataactagaataaagagctctttcactcaaaaatgacttatttttctgattttacttgcaaatgtaatttgaatgtgttgggtgttttgtttctatttgagggaggcctacgggagaagaggaggtagagaatcctcataccaaaaatgagaagaataaatagtaaaagccaatagcaagcactttttgattaaataatcattgttctctagaggatataaaaattctggaagatgtaattttaccaataaaaaaatgcactaaactacatctattgtgtgaatgtacgatttataagtgaattgtttttatttatctacccaagaaaacttctccatctcatgcatcacagaacttactcatctgtcaaatttgttaacatttccaaatttggagaaatggttctctactttaagaaataagttacttaacattatatcctttggaggaccgtatttttgtttgttgggttaaggggacagcaaaactgtgtaactgtaaaagtttttctttgaatttttaatctaataactgtagttggcaagggattattacgtgctgtaaacacgactgaaccctgaagagtgggatccagggactgagtaggacacacgaggtcttgaaaaggagacactgctaagacttaggaaattctcatttgttctttttttattatttttaatttatattaggtggagtctcgttctgtcacccaggctggaatacagtggtgcgatctcagctcactgcaacctccacctcccaggttcaagcggttctcctgcctcgggctccaaagtagctgggattacaggtgcctgccaacacgcttagctaatttttgtatttttagtagagacaaggtttcacaatgttggctaggctggtcttgagctcctgacctcaggtgatccacccaccttggcctcccaaaatgctgggaatacaggcatgagccactgcacccagcctgttctttcattttttttaagtagaaacgtaatacatactttttacgtatataacaaaaaaatcaaacattaactatggagacagtaaaatatgaaagtccattcttttaccctctttctccttcctatttccagtcgcatcatctccactccctcatcctaggcaaaaactttatttggttgcagcctcctgaacatcttcagtataatcataaaaaaacagccaggcacggtggcttacacctgtaatcccagcactttgggaggctgaggcaagcagatcacgaggtcaggagtttgagaccagcctggccaatatggtgaaaccccatctctgctaataataaaaaaaagttgccaggtgtggttgtgcgtacctgtactcccagctactcgggaggctgaggcaggagaatcacttgaacctgggaggcagaggtgcagtgagccaagatcttgccactgcactccagcctgagcaacagagcgagactccacctcaaaaaaacccaaaaaaacaaaacaaaaaacaaaaaaaaaaccatggattttgttcctacataattcttctaagacttacttttaaaatttgacagcttatgcacttttaaatatccacataatattctgctgaatgtataatataatcattcttctctaaaaccattttagtagtgtaactttttttcacaagtagcatttaattgaccgtctttccccgtattcgttcagttacatgtgtgtttctgcagaagagccctaaacacagagctgctagttgaagggcacatgctgctggtatcaaactgctttccagaaaagctatgccagtgttcactccaatcaagtggacctcatatttaaactaggaaacattttagtaagatttgggaacataatctatacacagaaagtatatcatgcaagtttctgtgtacataaagttcaagttcaaactcccaaaactgattaccatagttctatatttagaggactttttatttctcataagccaaattagcccaatacataaaaattcctcaatttttactttatgaaatctgaaaaacatttatttacatttatccctaaactcacaatgtgctcatttataaacaggctaagtgttagtaagataaagcacaaaagcccttctgaattgccacctgtgatagctacaccacatgtggccccagtgcccacatctcctggtattcacacatttgtacagctcctcctccatgatgaaactgggctggctgtctcagtttaaccagaagtagacagcagaagtcatgttggccaggaccaggcttaggccttaaaaagatctagcagcttctgcttttgagctttagaaagctggccaccccataagaagtctggctatcttgttgggagagagagtggctatggggggagggagtggctatggggagagggagtggtcatggagagagggaatggcctttgatatcacatagggagaaccaaggaactcagccaacaatgagaacaaggccccagacagtgaccccagtcaacagccatgccagctagccctcagccatttgagttatcctagttatgagtgaagaggccatcttggtgttgcaggcctagctgacatcttgtggaacaccagtgttgtcatccatgttgttcttttgcccaatttcctgacccatggaattgtgagaaataataaaatgtctgttctaaataagccactaaattctcctgaagcggattttgtaacactaagtagtactatctaaatatttaagtttgttcatactaacattctagaacattttaaaaaattcagccttgagaacacaggagtgtttacctgacatattcttttttattttcttcattaacagggatacttttgccatttggtttaagttcatgctgaataatttcaccatatgcattatgttcaacacagaaggtatggtccaaaacacctgtaatatcattctcactggataggaaagaggaaaagatatgtaactgggaaacctaaaatacagaccctatagatgtattaattggtgagataaaactaagatcattttataatataacaaatgtgaggtcagattctgcttccataccacctagttctttctggacagaaaagtcaaagagctttaaccttcataaacacagaaaacatttaacttcctgagtaatgagaaagagccttggtcaaagctgggccttgctagaaccaccaatataggacaatttcagttacatttggcattctgaagagccctactcggtactgtactccaaggggccaagtgcctgtgtatccctagtgagaaagctactgtatactttataaaaaataaacattgccagtgtatcttcacaaaataatgacctcttgcaaaacagaatcagttcttagcttaaattcaacaattagttcttattctaaaagtacggttccaacaatcgccacttcattaaaagcaacagcagccaagaatttgctattctaacacacgcaggtttggaacagaatttgtatcacattgaggaaacaattatataaagtacttttaaaaatagaaatatactagttgttttttcctttttaaagtagtaacacttgctaagtttaaggaatttgaaatgtataaagaagctacaggaaagggggaaatcatatgcgatcctatcactcaaataaccactcaatattttctgtgtaatttttttaagtacatcagttttgaaacatatttttttttaaagctcagagtttataatgaagagatagaagactcaatacatacagtatccacactaaactgttgtgaagatccggatctactaactccatgtcatccaaggtaattgacttcccaagcaattgcttataaaaaggcaatgtgaaaccaccatcaatataatgtccatgaaacacagccattcccattattcgtccaacaaagtggaaataggataaatgttcctgaaattgaaaacagtatatatactcgttaggcactacccaggaaaattttaataaaaatgaaatatttcagcaacattaatctttttgagaataagcataaaatttttactcttcaatagagtcaggagggagtatttctctagggcatgctccagagtctctagatcaccagagaacagcatattacacagggtaatatgcccttctcgcaggggccagtcattttgtaaattttatcttttagaaattaagtccaaactatggtcccggagcttcattcaactacttgcagatccttttctcttccttctctcacctcctgctgagccctttgtcatgaaaaaaaatctttcaatcctaaacctccctacttccttgacctaaccagaaattaaacatcaaaacaccatagatttaagagcacagacttggtgtcagacttgaattagaatcacgattctgccagtcaatggcatatggacaaattaacccccgtaagactaactgtccacatctggaaatatgaggataataacagtatctaaaaagcatctctatgaggagtaaaatgaggtgatgtttgaaacccatggaactggacctggcatgttataagcagtcaatgagtctgggctattgttactacaggggcagtagtgggccctccaaaaagaaccttcacctcaaaatcctccctaaataacttcttgaaacaaatctaacatttctacccttttatatatatttggtctttcgtcacagattgttttgttagatgtttgtatttttaaattcttttacctctctatttactaagtaatcttttaagctcgtctttaaaccttttatcttgtttttgtttcttttttaaaagtaacacacgcgcacgcacacaaacatatatatttaccaaagttgcattatactatttgataaccttcgtttcacttaacacatcataaacaccatctttccatatcattaactattatcccacattatcattttagtggctgtatagtatgcccttatatggaaagacaatataaaaacaatacattagtaataactgctaacttctgttgagtgcttagtaatgtagttgatagagttgtagagtgaataacatacagcactgtgctaagtgcttaatgtgcagggtcccatttcattctcataacccctctttgaggtacaaatgtatttattagcaatgacaaaactgaagcttaagtccatgaacttgccctgaaaggtcacaaagctagtaagtgatgagaccacgacacgtctttctaattccagaacctatgcctttaatcatttgcattattctgcttcatgtcataatttaatcagtccccgctcctgaagacaactatgttgttttcagttgagtgctactataaacaataaacatccctgtttccaaattggtgcatatatccataatcatctgcttgggaaaattttatagaaggggaattgctgagtcaaagggcacaactaagacaaggacaaataatttctatataataaactacattaacatgtaaacatgaaaagcattattggtcacaattcacatcataacttcaaatcataccggattaactgcagaatcaggattgatctgcaatgtataaatatcatctcttgaatactggaagaggccatagtatggattcaacatttcatgtgacaagagatacaaccattccctagaaaacaagatatgaccaaggaatttttttgttaatgtatacatttttattaagatatgtcattaactaatcattttagcaaataattatttaaattaataaaaggcaaaaaagcactaactacagttatataagatcacattggaaaaatctaccgtacccaaatagcatataaaaactctattatattgaagtaacatctcacgcaaaatttaggcaattttattatattttagcatcaaagagtataaaagtattatccaacagttcagctactcacgagatgatacggtccagtggtctgttacttttaattgccaaataaatttgtaatccataataaacataaaacaaaaggaagaatatggttttatttcaaaatgtccatgtgaggctggggacggtggctcacacctgtaatcccagcactttggggggccaagacaggtggttcgcttgtgctcaggagtttgtgaccagcctgggcaacaaggcgaaatcccatctctacaaaaaatacaaaaattagccaggttgatggcaagtgcctatagtcccagctacttgggaggcagaggtgggaggattgcttgagccctggaggttgaggctgcagtgagctgagattgcaccactgcaccccaggctgggtgacagagaccctgtctcaaagaaaaaaaaaaaaagtccacgtcatctctattatcctggtctactcctatcacgaccagtttatacagacatataatatagtattgatttactcttcattttggacaaggctatattttgttgtagtattaaggacatttcattattcatttcattatcattcactgtataaaccctgaaacataccatgataaaaatataagtgggcaaggattgcaaggcatttggtgtaggtatggactcaagggcaaacgtgcattctttgggtatgttccataccacttcttgacttcaatgtaaatcaatgtttttaaaacctggaataaaaagtacttccaccttgaatttattaaaaccttcaaatttttcaaagtataaaagataatttgttactcactttggaaattcactagtctaggacttaagagatgtagttctagtcttaattcttgtcattccttggctagggaaggttatttaaatgatatattttgatattatggattaaacagattgaataatatttttgagcaaatgcagaatagtattaaaactagttaaaggaaactgtttcaaaattctatgtgatggagtctaaattaaattactaccattatgtaacatttgaaaaactactctagagattaaaaaaagaagtaacgtctccacataagcagccttcccaacataacactcatctgatgtgtcttgtgtttttggtgtgtgtatgtgttttttaaaaagaaaatccaaatttttgttttgttttaccaagtatttagaacacaaataagagcagaactcaactactttgagattctactatggaataaagttcagaaaaagcagatcactgtcacattccatttattctgctcaaaccctgacagtagtaaggttaaaaaacaaaaaactgggctgggttcggtggctcatgactgtaatcccagcactttgggaggctaaggcgggcagatcacaaggtcaggagattgagaccagcatggccaacatggtgaaaccccgtctctattaaaaatacaaaaattagctaggcgtggttgtatgcgcctgtagtccagctacccgggagactgaggctggagaatcgcttgaacccaggaggcagaggttgcagggagccgagattgcgccactgcactccagcctggcgacagagtgagattccatctcaaaaacaacaacaacaaaaaaaactgactacgagccaggcatggtggctcgcgcctgtaattccagcacttagggaggcggaggctggaggatcacttgaggccaggagtttgagaccagcctgggcaacacaagatcctgtttctaccaaaaaaaaaaaaatttttttttttttgagacggagtcacactctgtcaccaggctggagtgcagtagcacgatctcggctcagtgcaacctttgcctcctgggttcaagtgattcccctgcctcagcctcccgaatagctgggactacaggtgtgcgccaccatacccagctaatcttttttttttagtttttagtagagacggggtttcatcatgttggccaggatggtctcaatctcttgacctcgtgatctgcccacctcagtctcccaaagtgctgggattacaggtgtgagccactgcacctggccaaatttttttttttttaattaggcatggaagcatgtgcctatagtcctagctctttaggaggctgaggcaggaggatcacttgtacctaggagttcgaagctgcagtgagccatgatcacaccactgcactccatggagcctgggtgacagagtgagaccccgtctctaaaaaactaaataaataaaataaactacttatttgatctatacatataattatagtacttagatgccaccagtagttgatgatgaagtgttcccaataaacattcactctagttatgagtaagtaatacaaattccacagaaactgtcaagtcctaagtatgatgtacaagggattatttttaaaaatccacactaaagaaactatccatccgtaggtttaaaaggtgacagaatgaaaataaggctacaaatacacacatgtaatgctaaataacaattaatgggaattattgaaaacataattttggttggatttaagattagggaaagcagaattaccacaatgatccttggaacatttcaatacagagctacagtgtttctccatttatataaaacgaattttcacacatagaaaagaattcttgtagtaaatataatatcagaaataaatcactggctgggtgtggtggctcacacctgtaatcccagcacttcggaaggctggggcaggcagattgtttgagctcagaagttcgagaatagcctgggcaacatggcaaaaccccatctctacaaaaaaaaaaaaacaaaaactagccgggtgtggtggcttgtacctgtagtcccagctactcaggaggctgaggtgggaggctctcttgagcccaggatggggaggttgcagtgagctgagatcacgccactacactccagcctgggtgacagagggagaccctgtctccaaaaaaaaaaaaaaaaaaaaaaagaaagaaaattaatttgacttgacctgtgagttacaaatgtagcagaagcattctaccttctgtactgaaacattctgaggaccatcatgatatgtacatgtgtatacacacatgcatgcatacacattcatttaacaaggaaaaaaggcataacaaatggaagcaaagagaaccagtattcagttcaggttatatatcatttaaatctcaaaactgttcctgacaatgtaaagcagaggcaataatgtacttaaagagagagatggagaaaacacagggcctgcagtctcatgggactcagatggtctactggggagttccagaatacttgtccggtagcagtgccaccctaacctcattatgaatatatctattaggatatcctcagtgatacaaacattagggaataacaaaaaataaatgtcgatgagaaagttacaccacaggaagtagcttaaatttgtaagtacaaagatccatatgtcataagctggcaagcaagtccatacctggcaacgcctccatagtcaaggccttcttctccacgaaattttatcattaatcgcttccagagatcttttggtctcattttcatgacctgtcgatatgattcctgaaaaaaataatttttaataccctattactattaggtccttttagcctattacttaatctctccctgccaatccatccaaaaaactcaagtctaaataaggtgaaatttggccaggtgcagtagctcacacctgtaatcccaacactttgggaggctgaggcaggaggatcacctgaggccaggaattctagaccagcctgggcaacatagtgaaactctgtctatacaaaaagttttttcttaaatagctgggcatggtggcatgcacctgtagtcctagctacttggaaggctaaggtgggaggactgcttgagcccaggagttcaaggctacagtgagctatgatcatgccactgcactccagcctgggtgacagagcaagaccttgtctctttttaaaaaagaggccaggtgcagtggctcatgcctgtaatcccagcactttgggaggctgaggcgggcatatcacgaggtcaagagatcgagaccatcctggccaacatggtgaaaccccatctctactaaaaatacaaaaattagctgagcgtggtagcgtgtgcctgtagtcccaggtactcaagaggctgaggcaggagaatcgcttgaacccaggaggcagaggttgcagtgagctgagattgcgtcactgcactccagcctggcgacagactccgtctcaaaaaaaaaaaaaaaaaaaaaaaaaaaagagagagagagaaaaattagcactctcggtattcttggaaaagagcataaaacaaatttaacttctaatttttttttttttttgagacggagtttcgttcttattgcccaggctggagtacaatggtacaatctcggctcaccgcaacctccgcctcctgggttcaagtgattctcctgcctcagcctcccgagtagctgggattacaggcatgtgccaccatgcccagctaattttgtatttttagtagagatggggtttctccatgttagtcagcctggcctcgagctgcgacctcaggtgatccgcccacctcagcctcccaaagtgctgggattacaggcgtgagccaccgcacccggccaatttctctctaatttaaaataaggtttgtattagcaagcaatgggtttctggaaaaaaaaatagtaaaacaaaataaggctcgtaaatttacctcaaaaatctcttccctggaaacctcaatgcggcaatgacctgcctgaggctgttgttgggaaagttcttgccgcaaaatttttagtttctgaaccaggtctcgcttgtaccttgggactgtcaggcattctgtgtcatcaggacataacgataccacttgctgttgctgttggtctttcaattggttctgccgactagaagtaaacatagatgttattattaaagtatatcaaattttaaaaattgcaattatagatttaaaatagcatcatattataaagcaagtctagctctatcattttccaagccttagtagaacatatacttggcttgacattttttggcagcaataaaccagctacaaagtttatttctcatagtccacataaactgacagaattggataatggaattttatccataaagctttatacagcttctgaggacaaatttttccaatatagcttccattttcccctacagagtttaccatcacccactttaaaattcaggcatgtgccaaacactgcttgttatctagactctttctttctggaagagccaaacaggagtctgaaaggcagcttggcagggatcccttctttttatacaccaggccaaatattatacctaaaacatatgaccatacaaagaaaatacacctttgtttaaaatgccaagtcaatattaactactcttacaaatactataataaagatgttttaacatacacacaaaatcaaaacagattaccgtgtacataaatgcattccataaacaactgtataatcttattttttaaatgaacttgggtatatttcatatcagatacaaaaagtaactcaaaatggactgcaaacatcaatgtaaaatccaaagccataaaacttctaagcacaggagaaaatttgttatgacatacatcaggcaatgaatgatttcttagatataacaccaaaagcacaatccatgaaagaacaaatggataaacagaacatccatttttaaattttttttaaagaggcagggtcttgctatattgcccaggctggccctgaactcctggttcaagtgatcctcctgcctcagcctcctggtagctagaactacaggcacccaataccaccctcagcttaaagaaaattgctgctcttcaaaagacactgtttaggaaaactaaaagacaagtcaagtcatagactaggaaaattcctttggaaagcatatatcagatatgtaaatatctaaagaagctcaaaactcaacaaaaaactgagctgctcgatttgggagggctgggggcatggcaaaagattctgccaaagaagccattctactcctaggttatttatttaaccaagagaaatgagggcatatacatacaaagacttgcacataaatgttcataatagttttatctgtcatagcgaaagactggaaacaacccaaatgcccatcagtagataaatgaataaactgtggtatacccatacaatggaataccaccaacaatacaaagaaatgaactatgtaacaatgatgaatctcattatgtgagtaaaagaaatcatactgcatgattccatttatctagaaaatgcaaactaatatactgacagaaagcaggtcagcagttggctggagatggggtgttatgggttgagctgtgtgtcccccaaaagatatgctgaaggctcaacatctggtcaacctgtggatttgaccttatttggaaataaggtctttgcagataaaattaaggtgaggtaagatcatactggattaggatggccttaaatccaaaaactgatgtctttataagaagagggaaattaggatacatacatacaggaaagaagactatgggaggacagaagacaaagactggagcaatttgtctacaagccaaggaacaccaaggtttccagaaaccactgggaagttaggaaagaggcatggaacagattctctctcaaagcctctggaaggaactcattatcacttactatagagtcagccccttaccctgtagttctgcctccagaattgtgagagaatgaatttctgttgttttaagccatccagttcgtggtattttgttacagcagccctgggaaactaacacagggtggaagtcccacagggagggacagaagaaatcacaaaagggcaagagaaaacttttgggggtggtgaatatgttcactatcttcactgtggtgatggtttcatggtgtatatcaaaacttaaactgtacactttaaatattcagtttattgtatgtcaatatatttcaataaggctgattttaaaaaatccagcagatatcaggcctcttcacaaagcctcctgtgaaagaccaagccatgcaaatggaaaggtggcttagagctgaaggacaaaaacggacacaggagaaaatccttctgggatgtgggcagctagcctggaactattgttcctgatgcactcagggaaaaaaaaaatctaactacccaataaagcagcctgtctcttcaggtgtgctagggtgcaaggggcagttctgtaagggctgatgtgagagtgcaggccaggaaacagtgggggtgctggtctatcctttagggcctctgccaatgtctaaaggctttatcaaacaagcaaatgattttcttgaaatcaagtagatctgataagcagggaaaagactcaaattgtaatccccttgcccataagtcatctttttctttaaaaagaaaagcttcctttaagggtataaggcagaatatcttcatgcaatgccagtcaaaggaagggaaataagtaattagtgttactggaatcaaaacatgaagggaaaaaaaaaaacctccatagtcagactgggtggattcaaatcccagctctagcaccttttatgcacctctggacaagttctgtaactgcttgaggccccatttttctcactgatgagaaagaggtagcccaggattgcaatgaagatgacatgggcactcagagcatggtaagtgcaaaataaatatcagttactatagctactattaagatagttactgagttacaaaaacatgcttttcaagcaaaggaaataaaaaaaaaaactgactaaaatgctttcttagaagaatatgcttccttggcaaagttatttattaaaccccaatggcaatgttttgcaatataatttatattctaatgacatttttgccaaaaaaatttccaagagagaaaaacaataaaaaccataatagatgtaccaaataaggtaatactatatttgacggctcatagacatagattcaaaactccgttaacacttgtctaaagaaaaaccccccaatttaaaaatctttaaaaaatagaaatcaaacattaatagaaaagatacttctatccgacatatcctgatatgtaaagattaataaattaactgttataatttaaaattagtgccttatgaatctttttaaaactacaattttaagattaaaattgtttcttatgtatctcaataaattgtttcacatataaattatatactacattacatagctgaataaaaactaatttatcactttaaagttaatttatgacagaaactttaatgctgcaaataatttttatatattttatgtaatgtaacacgaatataaaccccagggaggatctatcaggttagggactttaccgaactagtagctggagttgtgaaatcctgtccttaagaagaaaaaaacaaaacaaaacaaaacaaaaacggatgtagaaatgcttaagctttctggttttttttttttttttttttttttttttttgagacagtctcgctgtgttgcccaggctggagtgcagtggcgcaatctccgctcactgcaacctccgcctcccagggtcaagctattctcctgcctcagcctcccgagtagctgggactacaggtgcctgccaccatgcccggctaatttttgtatttttagtagagacggggtttcaccatattggccaggctggtctcaaactcctgaccttgtgatccacccacctcggcctcccaaagcgctgggattacaggcgtgagccatcgtgccccgctgacagagagtttttttttttttttagatagagactctgtcgcccaggctggagtacagtggcgcgatctcagctcactacaccctctacctcccaggttcaaggaattctcatgcctcagcctcccgagtagctgggattacaggcatgcaccaccacgcctactttttttgtagagacaggtttgtcatgttggccaggctgatctccaactcctggcctcaagtgatctacccgcctcggcctcccaaagtgctgggattaccagtgtgagccaccatgcccagccttaagctttttcatagcacagtaacttgaaatcaaagatattgaagagaggaacaaattaatactaaaatacaaaaatgttcaaatgaaaactttctattaggaatatgtataaaacttccagataatgcaaatgctggccatattaatggaaactaatcaacaaaattggaaaactaacaattataagaaaactagtcaaatgttcttcaagttacttcctgtcatttactccaacaaacagaaaagacaacagacatttctaatcatcccacctgtagttattccttcagaacattatttttcattcagttatttaatacaactaactattcagcaaaaagatggaagatctgtaactgttctactgaaatattctactggcaacatcaaggcaaacatctattacctaaagcagagatgtccaatcttttggcttccctgggccacactggaaaaagaactgtctcaggccacacataaaatacactaacaatagctaatgagctgttaaaaaaatctcataatgttttgctttgtttttgaaacaaagtctggctctatcacccaggctggaatgtagtggtgtgatcttggctcactgcaacctccacctcccaggttcaagcaattctcctgcctcagcctcctgggtcccaactagctgggattacaggcacccgccaccacacctggctttttttttttttttttttgagacggagtttcgctctattgccaggctggagtgcagtggcgctgtctcggctcactgcaaagtcagcctccctggttcaagcaattctcctgcctcagcctcccgagtagctgggactacaggcgtgcaccaccacacccagctaatttttttgtatttttagtagagatggggtttcaccgtattagccaggatggtctcgatctcctgatcttgtgatccacccgccttggcctcccaaagtggtgggattacaggtgtgggccaccgcgcctggcctaatttttgtatttttagtagagacggggtttcaccatgttggccaggctggtctcgaactcctgacctcaggcaatccgcccgcctcagcctcccaaagtgctgggattataggcgttgagccactatgccttgcccacataatggtttttaagaaggtttaccagcttgttttgggccacactgaaagccgtcctgggcccagcctaagggccgtgagttggacaagcttgacctaaagggatgatcctggaggcaggaggtaaataaagcacaaccacctcttggaggcttcctgggcctctcagagagccatactggctcttgattaccattgtacatttgtcaagtactttgggtatgttacatactaaagcagcaaaaataaatgggatacacgtcttcttaagtaattcaaagtctagtaggggaagcagaaaggtaacaaacaattaagatacaaaagtaaaacaaaagccctctgtagagtgctccaacatcttttattccttatcatctccccaaattccaatttgctgcccctatatgccctttaaaaaaacccaggccgggcacaacggctcacacctgtaatcccagcactttgggaggctgaggcaggaggatcacttgaggccaagagttggagaccagcctggctaacacggtgaaacttcgtctctactaaaaatacaaaaattagctgggcgtggtggtgcgcgcctgtagtcccagctactcaggaggctgaggcaggagaatcgcttgaacccaagaggcagaggttgcagtgagctgagatagcaccactgcactccagcctgggcaacaaagcaagactccatctcaaaaaaaattccagaactaggcgtggtggctcacacctgtaatcccagcactttgggaggccgaggcgggcagatcacctgaggtgtcaagagctcgagaccagtctgggcaacgcggtgaaaccccatctctactaaaaatacaaaaattagctcggcgtggtggcaagcacctataatcccagctaacttggaaggctgaggcaggagaattgcttgaacccgggatgtggaggttgcagtgagctgagatcacgccattgtactccagcctgggtgacaacagggaaactccatctaaaaaaaaaaaaatccatacacaaaagtaaagtccacatggattaaagactttacagtaaaagacaaaactataaatgtattaaaaacatttacttgtagtgtgaattttagaagataaagattacattagaaaaataggcaaaaaagatataaattaacaaaaaaagttgatgcagctggtcaataggccaaaaaaaagctgttcaagctcaatagacaatggcaaaaaattgtgaacaggaccttcacaaaaacaggaaatccaaatagtcaataaacctataaaaaggtgctcaacctcatcagtaattaggaaaattcaagttaaagttacaatgggaaaccattaaacatcatcagaacagcaaaaattttgaagtccaacaacagcaagtactggcaagcttctgcagcaacaggaactcatatattgccggtaaaagactaaactggcatagccactttagaaaagttacctttatacattaaagttgaagatagaaatattctacgacatagcaattccacaaccaggcaagcgccctagagcagtgttactcaaagggtagactgcagatgacacttattttgctatctaggctataaagaccctaatgcacagaaacagtccatacttctctgtttcttcagatacttttacattagggctttcaaatacttgcgaccttcatttgtaagcaaggttttagaatcttctatctacaataaagtaagatctgctgacataatgagactgccaggataattatacatatttcgaagaaggaaccaaagatacacattttcaatgttttctcctattatcctaaaaaactggtagccagttctcatttaaattttttgctttattaacctaactccaaaaattaatgaaacaaggacattttcagaagtcattttaaagtatattattatttttgttgtgtttttaacattttaacatacataagaactttacaacaaatgaataagacagagcaggtaatgtcaccattcatttagagaagctaaaatgaattattcaggggtcagagtgaaccttgctctccaagttcttagcctaaaatccttgttgctataccactctcagtgtttttgccagaagtgttgaaaaagacactttgctacttagcttagtaatgaagttttcctgttctctcttttcctcctcctgcccccattcttcagaaggcaatgctaataagtaacagagttagaagaaatgaggcagctagagagaaaagaaaagcaaaggatgcaaataatatacacacaatactcagtatagtgcctcacaggcagctgaagccagagcatcctggtttcactccagacttcaccactggcaacgtatggaaagtcatgtaacctctatacctcagtttcctcatctgtaaaaatggcagtagctaactcacagagtttttctgaggatgaaattacgaacttggggtgtttttgtttgtttgctttttaaagacaagagtctcactctgttgcccaagctagaatgagtggcgcgatcacagctcactgcagccacgacctcctgagctcaagagatcctcccacctcggtgtcctgagtagctgggaccacaggtgcgcaccaccatgaccagctaattttaaaaaaattttttgaagagaataggactcacatgttggccaggttggtcttgaactcctaggctcaagtgattctccaacctcagcctcccaaagtgctgggattacagcatgagccacatgcctggccttaccaacatatgtaaagtataaagaacaatgcttgtcacacagtaagtgctactaaggtgttagccattaatataaattattaataattttgtattacaatggcaacacaaaattagcctgttcaacccctacttctcctgtcaagatattgcctctgtaaaaggccatcttgagcacctctaataacccttttcctaacattccaagacaggttcctacctaaaagcatagtaggtttaaaatactcatatcagagtaaaccttgtcacactcttacataaattttgctcaataaaagtaaattataactgatgaaagtagatgttctttcattttttaagagacagggtctccatctgtcacccaggctggagttggggtggtgtgatcatagtccactgcagcctcaaactcctgggctcaggcgattctcctgcctcagtttcccaagtagctaggactgcaggcatacaccaccacacccagctaattttttaatttaaacaactttttttttgtagagatgaggtctcactatattgaccaggctagtctcaaacccctggcctcaagtgatcctgctgccacggcctcccaaagcactgggattaaaggcgtgagccactgtatcgagactcacatttattattaaaagcatctatgcgtttcatcatgtttaactcccattttaacatgtattgtttcaaaaacttactttaaaactaaatgcaagttagcagacagccgaggatctgtaaattgtgttgttctgttgttatggtcaacgaaataaactctgcctgttgccgtattacggatctcccatccaggaggcaatggaccaagctcttcacaattgatgttgctaagatccctgcaaaaacaaatataaaataaaaaatacctcattgctcgccctgctgaaccaagcaagtgtaaatgacacagaacaattccacaaagtgtgagaaaatgtattgtttcagaaacttgagatgttcagctggaatctttaattcccaatggtttaacaaactttcatcttcaaagcccaatccataaatggctcagaaaaacttatcacatagcctacattttttagtaatttcctaggctttaatgtaatacagatttaaattaatataaaatcaatcccaatatttgccaacataaactgtatttcaacacgtgtttgacaggaagtaattttacaagtgtcagtgacataaagaattaaatgctttctaaaatgtcccttcatttctttactataccataaaatttgcataaaatgtccattccataattttaagctcgccaacaaagcaaaactggaaatgttactgaaattatgatcctgaaaataatcacagcatatttttaaagaataaactgcaattctaaaatctgtaaagttagtcaatgaagaacctgtttaagatacattaccaagagtgctctaagggttaccactgcaataagaaaagctaagatttttaatggaccaaagactattgctattatattatacattcttaaaatactagtatatatagagaaggattaatagggccttaaagaatgagttaaggagcttccaggttggtgaacacactgaggtactggacggtggcctgcccagagagggcatggtagctccttgccctccccccatactgtgtcctaagcattgcttccatttggctgttccagagttgtagcctctgtaataaactggcaatagaactgcaaattcttatcctctacactgttagaaaaaaatatttcagtgaagcttccaaagtgtggaaattgctgttgtcatccaccagaagagaaaagtcactgcccttggtgacataattgagactgcgtgtaacaatgtatgatatgatcaggtcatttcctgccttaaatgaatactttaggttaccagagccatgtgtaaataccaaagaaacgacatactctgaaagtgaccaagcaaactcaagcatctagatagtaaaactgtttttgtggtcctctttttattaaaaaaaagaggaggaggaggaggaggaggaggaggaggaggagggggaggaggaggagggggaggaggaggaggaggagggggaggaggaggggaggaggaggggaggaggaggaggggaggaggaggaggaggggaggaggaggaggaggaggagggggaggaggaggaggagaagataaaagcagcatgtttatgtaaatttaaattgtaacagataattataagtaatcacaaatttcatcaaaaccacattttaaaagttatactagaaaaatgtttttcctgagatgacttctccttagtcacagtgaaaccaatgatgggcacacagggacctatatttgccaaagcaatcattctgacttctgctataggtgttccaagagactcctgctacagaacagctaaagtgtaggaaaaaacaccatttgaaacactgctagtctcaaaagaggcaagggaaagttccaagaattctcctcaaattttaaaaaaaagggagttcgggggactgagtaaagatggtacctgagtggcaggtaggcagaagggcaggccagcagcaagactgggataggaaacctgaagcttcctccccaagctgagaactcagggagttcagcctcccaaattcagcctcccaaagtgctgggattataggcatgagccactgcaccggccccaaatagatttttaatggtttagaaatgaaaaacaggagctggaggacattatccttagcaaactaaagcaggaacagaaaaccaaatattgcatgttctcacttataagtaggagctaaatgatgggaacacatggacacatggagaggaacaacaggtactatggcctatcagagggtggaaggtggaagaagggagaggatcagcaaaaataacgaatgggtactaggcttagtatctgggtgacagaatcatctgtacaacaaaccctcatgacacaagtttacctataacaaacctgcacatgtacccctgaacctaaaagttaaaaaaaaaattaaaataaaaaatgaacaattctactgataaaatgtagaatttcatttcatgtcattttatttagaattttataaatctacagtcatacacgggagagtgctaaagcactgattaaaagagcaaaacactagaaataatctttatgtctcactgggagctggttaaagaaaaatggaatgttatacagtcatacaaagtaacacagatctgtatttcaagactacagtcactcagtatgcaatataacaaataacaaggcattaaccattgttttaaagagaaatgcaaaacatgatgaaatgagatttcttggataaatctaggtatcctggatatctttaaataaagtttgttttaaagagtctgactttgcaattttataaatatcttcgaatagtgatattgtaatagaaactaaatatttatagtatactttcataaaagatcttccatacaaaaggcatatttgctaaaggatcctccaaaacaaaagatgtaagtttttaaggtaatttgggggatacagaataagaaaaataatcccaagtgttatttcataaaatcatcattcaaaatacatgtcaatactcaacatgagatattcttaaagcttcgcagaaatcctttactcactaataaaaaactgacatgtttcctctggaataagagcctgttaccaacagtggtgctgaaatctgtctcaatttcaatttctgttgccagcttacatactattctttcaacatgtaactcaaggtcaactttctcactattgtaaatcatttagttaaaaaaaatgatcattgttattctatacatttcctacaagtaatttctaattaatttaaagaaaagcttattattgaccttcaactagataaacagaatccaaaaagctttttacaatttatataataaaactgattttgaaaagttaggcccttggattttttttttctttttttagtaagcttaaaaaaaaaaaagtaaaatttcctccccactactttttatctatttatttttttagagatggggtcttgctctgttgccgaggctggagtgccacggtgcgatctcggctcaccacaacctccacctcccaggttcaagcaattcttcttcttcagcctcctgagtagctgggattacaggcacatgccaccatgcctggctaattttgtatttttagtagagacgggttttcaccatgttggccaggctggtctcaaattcctgacttcaagtgatcctcctgcctcagcctcccaaagtgctgggattacaggtgtgagccaccgagcccggcccccactactttttaaaaactaacagcttatattgtcaagacatggaaatggcaaccttgataaagtaatgagtaatagcacattcccttggttgccaccctcaaagaattctgagctctataacacaaagtaagacattttcataatcacagttttatttataaatagagagtatcaaagcaacccaagactagctagtcacatctgttttttattcaaatacacaatagagtcctgagcataagctttaggcaggaaaaaaaaacaaccttctgtgggttgttctgggggtttgttttggaggaggggcgctgctgtgcttaacataaaatatccacatcctacaaatcctttgtatgtgcaacatacaaagttgatttagaatttaatttagaattcaagcttttttccagttgtaactggactacttggtactttgcatctgttcattaaaaaataactcaaaatagggccaagcatggtggctcatgcctgtaatcccagcactttgggaggccgaggtgcacagattgcttgagctcaggagtttgagactagcttgggcaacatggcgtaaccccatctctactaaaaatacaaaaattagcggggtattgtggcgcatgcctgtagtcccagctattcaggaggctgaggtgggaggatgacttgaacccaggaggcagaggttgtagtgagccaggactgcactgctgctctccagcctggacagcagagctagatcctgtctcaaaaaaaagagagggagggaggcagggagaaaacaatgttccaaaaattatggtaaatcactaaatttatttgtgtgtcatttcatctttttgaagttaaaagtaattgacattttggttaggaaatgcaatatctgcagctgaaatacacaagtttggatatttaaattaaattagggccaggcacagtggctcacgcatgtaatcccagcactttggtaggtcgaggtgagcaaatcacctgaggtcaggtgctcaagacaagcctggacaacatggcaaaatcccgtctctactaaaaatacaaaaattagctgggtatggtggcaggtgcctgtaatcctagctactcaggaggctgaggcaggagaatcacttgaacccgggaggcggaggttgcagtgagctgacattgcaccactgcactcccgcctggacaacagaatgagactccatctcaaaaacattaattaattaattaaattacgttgttttctaaaaatggaattttattaaggaacacataacagaacattgaatgcatttatgaggttaaatttttcaaagatttttttttaagctgaaccataattaagaatatcaacctactacccgtttttaaagggtatgtgttccgttattccccaggtcaattttctttttctatccttttttttttttttttttttttttttgagacgggtctcgttctgtcacccaggctacagtgcagtggtgtgatctcagctcactgcaacttccgcctcccactttagcctcgcgagcagctgggactacacgaattttctttctctttttttgaaatggggtcttgccccagccatcccattactgggtatatacccaaacgattataaatcatgctgctataaagacacatgcacacgtatgtttattacggcactattcacaatagcaaagacttggaatccacccaaatgtccatcaatgatagactggattaagggcacatatacaccatggaatactatgcagccataaaaaaggatgagttcatgtcctttgtagggacatggatgaagctggaaaccatcattctcagccaactatcgcaaggccaaaaaaacaaacactgcatgttctcactcataggtgggaattgaacaatgagaacacttggacacaagaaggggaacatcacacaccagggcctgttgtggggtggggggaagggggagggatagcattaggatatatacctaatgtaaatgacaagttaatgggtgcagcacaccaacatggcacatgtatacatatgtaacaaacctgcacgttgtgaacatataccctagaacttaaagtataataaaataaataaataaataaataaataaaacactaaaaaaaaaaaaagagagagagagagagaaatggggtcttgctctgtcatccaggctggagtgctgtagcacgaccaaggctcactgcagcttcaacctccatggctcaagcaatcctcttgcctcagcctcccaagcaactgggaccacaacagatgtgctctaccacatacagctgatttttaatctttggtagagaccaggtctatgtggctcagactggtttcaaactcctggggctcaagtgatcctcatgcctcagcctcccaaagtgttgggaatacaggtaagagccacctgcttggtgccctaggacaaatttcaaactcctaaaagatccatgttttcattccacttttttttttttttttttttttgagacagagtctcgctctgtggccaggctggagtgcagtggcgtgatctcagctcactgcaaacctccacctccctgggttcaagcgattccctgcctcagccacccgagtagctgggattacaggcacgcgccaccacgcccagctcatttttgtatttttagtagagatggggtttcaccatgttggccaggatggtttcgatctcttgacctcatgatctgcccaccttggcctcccaaagtgctgggattacaggcatgagctaccatgccctgcctattccacttttttttaaggggaagcaggggagggtggctaggaactggtgagggaggggagaactgaggtgggattgcagagcagtaggcaggactttctactaaacgttaaaactgaagtaactatcagaagagtcaaacttttacataaactatttttaaaaggtaaaaatttcttaaaaatcaaagaaatcctaggtgaaatggctctttgatggtctaaagagtgcttaaaatacgttcttacctgggcactcttggatcatgccatgtgctcacaccagtctgtgtatgtaagaaatacacctggccttgttgcgttgtcctctgttctgtaaaattaataaacactgataacaaaaacattcagagtgtccagatcaaagacagttatatacactaagatgatatactaatagggaaaaatctccaaattaccaatctattttatttattatcaaaaaagggctttacaaatcatttgttctgtctcttggaaacaattttacaaatgatgagggccacaggccagctatccataaacaaactaaacttataacgtggcttaaatactaaatatgttgcaatggaaaacaaatcaagattgtcacaatactaataactaaaaaattttaaatgatgtataaaaggctctgagaaagaggctggccaacattgggaagatttgaggaggaacttccagaaattttcaaagagtctggaggttgataatgcttattatgcctaattttataccaaaacttatgttttctctttgctagacaaaggtatattctcaagattacatttgagctcaaagagaagcaaaacagatgagatactggggagacattctatgtcataaacagatagagatggaaaaatagccaaattagaaagaagaggactaaagagcaagcacgcacactggggagaaaaaagtcaaggacaaaatgaactcaaaatccttgggaagacagaggaaaggccagggtgaagagaacaatctctaaaagggtttctttatggtgggttttgttttgtcttttttttttagaacaacagaaccacttttctttagacaaaatccagtgagaaacttcaatacataaaaaactattactaatatttattagtataaatctaatttgtttataaacgtataatgtcaataaatttaaactttaaactttcacagattataaacaaaatcatattactatagaggacagctgtaataacttcagccttggtatccactttatttttatgttttggttgtacagtttttaaaattcaaatcacagaaatattgtagaagtataaccactcccactctaaagagcttgccttataatctcaaagagaaatggcaggagagtatttcttctcaggtctgaacactgataatgacagttaaaatttactatgccagacactgtgccagcatttcacatgaaattagatatcactgatttcttgcaacaaacctagatggttggtgctgttattttcctctatagaggataaaattgaggctcaaagaggttaaataatgtgctcggtgttacatggcaaagccaggatacgaacctaggtcctaagtctgtctgtcactcaagcctataatttaatgattgtgctaaaagttaacctttgagtcatagcacagttaatggacaagttttttcaaattaaagagctaaaatacatttaaaactaaaataagaatcatgcatttgcagaagagttttaaaatatattcttgagtaaaataaaacttagatgtggcaattcccagtgttggtcattagatgtcaacatcaatccaaagtggtttatctatagtctgttaagagggcaaagatgtaagtaaccttggtgagcttttggcaagaagaggaagtcaagttcagactatatacaaggattcacaagatggtattaaattagaaacttccgtattctattaggagaagactcatgttatcttccacatgaaactttataatctaggattttatataagattgtaatcattttatacaaacatagaagtgactcagtcatttacaacaatccaatcagataatccaaaattacagacaatacaaatatatgatcagaaatatgcctttaaaattatttctaaatatatatgtctaaaaaattatgtcataggttgaacttcagattaccgttatcagtaacaataccatcttacctttctatacagtgcctatttacaaaacagtctcacttcatttcgtatgcttctcacactacctttgttataaactagtcatctcacttcattatagaagagcacaaacgctgaggctgaatgatgagcacaaggtcaaactgttggttaggtagtcatctaccacttcaaagacttttcaaagttgggaggttttatatttattttcatgcagaatccctaagctcagattaataactttttcaaaatatattttctgacttcctcagcaaactgaaatcagtaaaccacattttatttttcctttgtagttgtcataccatagccttctggtaggtctggaggagtatgtaaatgtgttctgctcatgtaatttctatgtcgttgtgacctgactctcctctctgccagcctgggatctgaagactgtccacatgttgcaccatttgttccactaattggagtgttctcatcaacaaagcagctaagaggtctgccagggctagaatattcggatgccggtctattgaaaattaacaaggaaaagatgttatcaatttagatatcaaaagtagagttctctagacaatatatatatactgcagtaacaaccacttatcatgtctgaaaacagaatgactaatacaagtataatgacttcaagaactctgagtaaaagcaaacctgaagtctctaagcaccaaagaaatgcaaatgataagcatgtcatcaactatgtatttaaatgactttaatgacatttgatataaaatccatacgtatctgtggatgtgagactggcttacaaaacactgcttgatctagctatagcctctccctcagacctgacttcccaccattctccctcccactctgcttcagccacactcatattcttcctgttccttgaacttgccaaggtcattccacctgagagcagttgctcttccttccatctggcatattcttttctcctactctccctaggcctggctcttttttgtcattcaaatcagtttattattgcctcctaagaggtccctcagacctcccaatctaaaaaagtcacccagtcatttgacaatacatcacaaaaggaaagaagacagtttgtctctttaaggggcttccagtctactattgcagatctttcaaaataaaaaaataatcaagagttcattcttaaattaacatggcagggtatggtggctcacacctgtaatcccagcactttgggagaccgaagcgagcggatcacttgaggtcaggagtttgagaccagcctggccaacacagcgaaaccccatctctactaaaaatacaaaaattagccgggtgtgggggcgggcgcctgtagtcccagctactcgggaggctgaggtacgagaattgcttgaatccaggaggcagaggttgcagtgggcagaggttgcagtgagccgagatcgtaccactgcactctagcctaggcaatagagcgggactccatctccaaaaaaaaaaaaaaattaacatttaaaacaacaatcatccttttatacatgtagaaattcaagctaattttactggttaaatgagtcagaaggaaattggtgttcaagtgaaaccttgaacactgacacaagtacatattcatttgtgctcagatataataaaaatgggtacttcaataaattccttggcagtttaatactagaaatgcaacttggcaacatgagctaagcttttacctgagaattataatgtaaaagagaaaaccttgtgatccaatgagttaagcaattagttctgtataaataaaagtaggtgcagctaatgaaaagaatttggtattttatgcctagtgccagtcctgctcaagaaggggaaaacaggcaaaacaaaacactgcacaagatggcaaattttgttctcacttaaaagggtgaggagaaggggattcagccacatagactatttgttttcagttacttcaaaagcacctctttgcagttcccaaaatttatcttgcatcccaatgtctttatacagtaagctccatgaagtgaccatacctgacattcttcaagatttagttcagagattcctctgcttatcaatttaattcattcgatttttattttattttattttatttgttttatttttgagactgagtctcgctctatcgcccaggccggagtgcagtggcgcaatctcggctcactgcaacctccacctcctgggttcaagccattctcctgcctcagcctcctgagtagctgggattacaggcacccaccaccacgtccagctaatttttgtatttttagtagagatggggtttctccatgttggtcaggctggtcttgaactcctgacctcaagtgatccgcccaccttggccttccaaagtgttgggcttacagtggtgagccaccatgcttggccaatatttttttttttttggggacagagtctcattctatcacccaggttagagtgcacgggcacgatcttggctcactgcaacctccaccacctatgttcaagcaatcctcccacctccacgtcccaagtagctgggaccacaagcataagtcacatgcccagctaatttttttggtagagacagggtttcatcatgttgcccaggctggtctcaaactcctgaactcaagtgatccacatgccttggcctcccaaagtgcagggattacaggcagcctcgaaaagtgcagggattacaggcatgagccaccacgccctgcctcattcaataaatatttattgagtaccactgcaggccctggagctacaatgacagcatgacctgtcaaacaaactgttgaagatcacttttaaaaaataacaatggcacctgttataagatctactgatctacgacagcaaaaaccaagaaaaaaaatctagtaaagctgacagataaatagaaaaggacttcaggagggtggctggcatagatcatgagaaaatatttgtatgttcttaccgtgttgggcgctcccattgcgtagttcttgttatatggtttagatactggattcttccagaggcggttctcctttcttcccagcttaaataaaaatattgagtgataaggcattaataggaaacttggacacagtgcaacaagcaagccagtaagacatctgctgttacaaatcgggaatgccaacccgaagtatcaattcacagaatatataattttttcaacttattttagaactctgtaatatattttatgggattctgaagcttctaaagtatttatgctgaggtgtaacaaatattttccatcagccaaactctgagaatttttaataatgtcaacaatacacaattaaattcatactaattactccagaatatggaaaatggctatactaagaatatatttaaccataaaatcacgaggtctcttgacttcgtgatccacccgcctcggcctcccaaagtgctgggattacaggtgtgagccaccgcatccggccaaaagcttttcaaagcatttagcctacccaaactaattttttaaaaatgaagactattggctggcacggtgtctcacgtctgtaattccagcattttgggaggctagcattttgggaggccaaggtaggcagatcacctgaggttaggagttcaagaccaggctggccaacatggtgaaaccctgtctctattaaaaatacaaaaattagccgggcgtggtagcatgcgcctgtaatcccagctactcgggaggttgaggcaggagaattgcttgaaccggggaggcggaggttgcagtgaaccaagatcatgccactgcactccagccagggtgacaagagcgaaactccttctcaaaaaaaaaaaaaaaatcgaaacagctactttctttttttttcttttttttttttttttgagacagagtcttgctccttcgccaggctggagtgcagtggcgcgatctcagctcactgcaacctacgcctcccgggttcaagcgattcttctgcctcagcctcctgagtagctgggactacaggtgcacaccaccacgcctggctactttttgtatttttagaagagacgtggtttcaccatgttggccaggatgctcttgatctcttgaccatgtagtcctcccgcctcagcctcccaaagtgctgggattacaggcgtaagccaccatgcctggccaagactgctactttctatcaactctttaccataattaatttaatgaaaaagagccaaatgactacagaaatgtgataatgttaatatttctacaaagatactggcagaggttgaagggctctaaaagacagaaaataaagagatgctagggtattttccctcctgtgattacaattatagtacaataatgtagggcaagtttagaacaataagccttattactgctggcactctctcaatattgattagttatttcatcctaaatttccttttcaaaaataccataatctacctcatatctataaaagagctaacagacatatctagaagctaaagtgacctacgaacagttaattatagtgatttttaacagtttaaaaaatgagtaaataccataacctgggtataaaattttgtataaaaaataattggagttaaaatttaaccatttatatacttcaatggatgcaatttattacatgtaagttatatctcatcgaagttagttaaaaatactttgaatgttaaaaataaaatcagaaaagagttagaactagtatcaaagagaccagtcataaaaatcatgactttagaatcaagacaggtttgtgtgttttggctctgccatttattatgtggccttaggcaaataacttctctcttagtttttgagggtaacaataatagtagcaatagaaataatagtagctaattatttactaagcgcttattttatgcaagacactgtgctaaagtgccttacctgaattatttcatttgatcctctcaacagtttatgagtatgctattatcactcatactcttttgtaaataaatataaaccaaagcatatggaagttaaataaattaaggtcataaagccaatacacagaatagtaaggattagaactcaggtggtctgatttcagaagcatggctatatactgccttccaagatgctatgagaattaaatgatatgtacataaagtgcttataacagtatctgccatatacatgctcaatgaaatcttactatgttattttaattactattacacaaattatccatcccatccctcttaaatatagcaatgtttctaatttagcacttgcatggcctgttttgaataatttaatcaagcaacatttttttaactagataatatttacaagagagttatatttgtcaagaaatttcatttgtctcctagtcaaaactcttaataaccaaatttaacacatctaatttgtggcttattttataaatttgtcgagacaagatcttccattaattttacaattagaaggaaaatctacattcaatatacgataaacaccatttaatatacaataaacacccacttatttctattcttttaaggatattatctatatatttctctaatgatttcagtgatgttagcttacccgtctggtaaatcgttatcaaataaacgactgcagtccacaacttgtcctcctgtgcctattcggtctctggactgaagacttactattaaatgacagaaatattactaagattcatacaactagaaagaactattataatctaaaatttctatcttcagaagacatctgacttagcttattttaatactttagaatgaactctttggtttctactaaaatttataatttcttttcccatagatttttccctttaggagtaatattagaattctaaggttttctacactttattacgttcatggaagaagcctaattcctttttcaccatagtaatggtgcatagcagagtcactactgtacttaattaagaagaggcatagctgggcgcggtggctcatgcctgtaatcccagcactttgggaggccgaggcgggcagatcacaaggtcaggagatcgagaccatcctggctaacacagggtgaaatcccgtctctactaaaaatacaaaaaaattagccaggcgtggtggtgggcacctgtagtcccagcttctcgggaggctgaggcaggagaatcgcttgaacctgggaggcggagcttgcagtgagctgagatcgcgccactgcactccagcctgggcgatacagcgagactccgtctcaaaaaaaaaaaaaaaaaaaaaaaaaggaagaggcataacatattaagggtgtattcatgtacaaagaagtttgaaaagtccatattaatttgactttaatacttgatcatctgaccatctaaaaaatacactgggctgggcgcagtggcttctgcctgtaatcccagcactttgggaggccgaggcaggcagatcatgaggtcaggagatcgagactagcctggcaaacatggtgaaaccccgtctctacaaaatacaaaaaattagccgggtgaggaactatgggcgtggtgcgtgcacctgcagtcccagctactggggaggctgaggcaggggaatcacttgaacctgggaggcagaggttgcagtgagccgtgattgcaccactgcactctagcctggcaacagagtgagactccgtctcaaaaaaataaataaataataaataaataaaaatacactgtattctagcaagagggccatcctggtattccagcaaaagagcaattcttggattgatggagttttaacaggacaccattatccagtgtagtataaaaccaccacaaagaacgaagaaggaagagatgtgaattctagagcaggctctagtaactagtttagcactgtaaccttgaacaaaacacttaatatacttaaggtgtagataatccctgtctgaataatgaaaaagttacgttaaattatatctctgaagtccttctttgccactccagtattgtttaattctagttctggtaactctcccaaaagacagaaggaggtgtagtcaaacttggctataaatccaacttcttaaataataggtcagcacaacaagtattacatctaaggacccttcattcaaagaagggtctcaaaattctgaaatcttccagctctgtaaacattttgaaagatcagttcaacacagagctccttgatattaagtcccatttagaggagagaacactatgaacacctacttggcaaatgtaaacaaaacattatatgaaaactgtactagacaactgtatcaatcagtttttaaatagataaaacaagtgaaatgcgtaccaaaatacaatcatagtagaaacaatgtattttctcattagcattgtttagaataatagtaagattcaaagctaaagaatttcatgggcttcaatttacatctccagaatgctatgttaatagcacagctattaactggttaaatgaattacatacccaccatgggctatcacacattaaaaatgctacagattttgcaagccttaatgcaaagtaggaaaaaaaaaaacaagtaacaatgctatagaaatgtgtttatggtccaaaaaaaaaaaaaaaaaagatgtttatgataaatttaaaccagtttttaaaaattcagtataatctcctctaaaaaaaatcacaaaaaaggtatacattcaagtaataacaataacgatacattagacttcccacgctcaaacaatcctcccacctcagcctcccaatgtagctggggcataacagttttaaacaaggaaaaaagtttgtactccttgaatcaattatctaaatttgggagattcttttctaaaaaagaatacagcaaagtgtacaaaaatatttgcaagtttcaatgttataatagcaaaaaaattttttaattattaagttatgatatatctatatacttcatcctttaaaaataattaattacaaagattataaatactaaaaatgattatggttaagtgaaagaaagcaaagtaaaaagttaatgttcactggaattaaagacatatacattttatatacatatttatgtatataaaaatactagaggggaatacagttttttttgtttgttttttgtttttttgtttttttgagatggagtctcactctgttgcccaggctggagtgcagtggtgagatcttggctcaccacagcctccacctcctaggttaaagcgattctcctgccttagcctcctgagtagctgggactacaggcacacaccaccatgccacaccagctaatttttgtattttttagtaaagacagggtttcaccatgctggccaggctggtttcgaactcctgacctcgtgatccacccaccttggcctcccaaagtgctgggattacagacgtgagccactgtgcccggcccgggaatacagtttttaaagttagtcttctagtgtccttttctccattttccaaaaagtatatatacctacttacaattatttgttagagggctcattctgaacgaactggaactcattctgtttttgaatgacaaaactaaagaatcataatgtttgagtccagcctgcctctctctttattaatggtcctattatgaacaccagattcacataagagctttaaataaatacatatatacaggcatacacatatttaagagtaaaacatttgttttctatgtggtgtactccagtaggtatacttctaatgtctaacaaagtttgctatttatataaatgcaaattcatacctagtaaaactattgttactactagacagtagttggcaagcattatgtaacataacaaatcaaatacagaaggaacacttacatgtgaaagtgttgtatgactgaatttatttttgagtttttttttttttttgctcccttctcaatctaagaatgacaggaattatcagtaatgatgtagtgtagatcaggaatccccaacccccaggccatggatgggtggggtattggtccagggtctgttaggaacccggccgcacaacaggagtgagtggcaggtgagtgagcattaccacccgagctctgcctcctatcagatcagtggcgacattagattctcataggagcacgaaccctattgtgaaccgcacacacaaggccagctccttatgagactctcatgcctgatgatctgtcactgtctcccatcacccacagatgggaccatctagttgcaggaaaacaagctcagggttcccactgattctacatgatggtgagttgtagaattagttcattatgtattacaatgtaataataataaagtgcacaataaatgtaatgcacttgaatcatcctgaaaccacctccacccccagcctggtctatggaaaaactgtattccatgaaaccggttcctggtaccaaaaatggtggggtgcgctggtatagatacttccctgggataaccacaatagggctttgctatgtggctactctgatggttctctaactatgaacccaattcactgccttgtaaaataaagtaccttcagtaactaaaacctctctgatgggttcataacaaaataatctcactaagttctgttctatcatgaagtgtgacattcctattgaatttttcttttctttttttttttttttgagacagggtcttgctcttgtcacccagctggagtgcaatggtgtgatcatggctcactgcaaccttcgcctcctgggttcaagcgattctcctgcctcagcctcccgagtagctgggattacaggcacctgccaccatgcccagctcattttttgtatttttagtagagatggggtttcaccatgttggccaggctggtctcgaactcctgacttcaggtgatccacccgcctcagcctcccaaagtgctgggattacaggtgttagccactgtgcctggccacatttttcttctttaatttaagaagcctctaagatgaacagtgtccttccatactaggcatcttgatcaaatctctatcaattcttaagaaaggtctcagcaaattttatatcaagcccttccctccaggtcaattcaagacaccctaaataccatataaggctactaagtgcctcatgagtaaggtaacaatttctccctttttccagtgttacactaccattgctcattctgttttttctcaattagcatagattttaaagctgtaaagcattaaacattaaaacaagttcaatagaatgttctcttcttactaaaaaaactagtttgagaattattttcagtaaactttaataacatttataaagtctgaacttagtgctctactatattaggatactttgaaagaattatatcctgaaggatcaacagttcttcacaaaacttttttttttttttacattaaagttttttaaattaagttaacctggatcctggattcactgtaacattttacctggctcatttaattcaggccaacacaatgaagctacagttattatactttgatttaaaaggtattttacactttaggtcagtttgaaaccaaaattcatgtaactttaaattccacacttacctactatctgtcctctaactgtatcattgtcatttggcccgagtttgcataaatccaacctctgatctatttgaagtcaacaaagaaagcaacgaaaaaattagctggtatcagagattctaacatctatagagtgacaataaatttccacaatccattagaaatcaaacctatcatttaaagagttcagatttcaaaaaccaaacactggtgtattacattgccaacatgcagtcactttctctccaaaacttttagaccactttagtctgagtcttaataattgttggtcttaaggaatttatccctaagccttggttttctcacatatgacaatatgtgaatcctcatatttttttgaggattaaatcagataattatgccaaactctcagcatagtgcctggcacataagtggtcaacaaatgttagttgtcattatcattttttaactaaccatttcaaatgacatggacccaaaaaagtattcataagaagccaagaataaactgtaaaatctgggtttgcatcagttctgtcactcattcatttaggagcaaatcatttcttctctcagatgcctcatctgtaaaagagatataacactgacctggccctgaaagttacagtaaggaacaatgtcacctaaagtacgctggttttactttgattacagcacttatagctgaatgcttttacaactgtatgccatctgtctacttatctgtgaattgataaatggaggagaccatatcttagtctttgtattttccactccaatctggtagaacattacatcaggtaggtgctcaataaatatttgataaattcaatattactgcacatcaaaaaagtcaaataaattaatacaatgaagcagtcacaagaaacagaaaaatccatgcccctaaactacagtccctacttatccaaccaaaaatacagacatttttccctttgcaaaataaatgggtgctactaagctggctatacagtggattctgcagagcaactaactcctcctctcctattcagtccttccaatgcggcatgctccctttgccagcaggcctttgcccttccttctcagaggacaggattcatgcctttttctcctttatacagccagggtttagaacagtagcacattaagtcttcaataactgtaaacttattgaactagggataatgtcagacatttgacctataagttttcagtttgctgagtaataaaacagtttacttttatatgcaattcattttttccaatcccagtgtcttttctctactgttggttaccctgtcagcccagaaatacaagaatttcttagatgcctttaaatatcttggactaagaacttctagctcaattttctgcccttttctttttcacaaggtcaatatatacctatgctgtggtatcatactacattaaaagagacaatctcttgatatatttaatagtcaatgctaaatttactcttttttgtttattaatttccttagatcttatgtgagtttgtttagcatatgcatctgggctaaaatcccatgacgatgactaacggtattttttacattatataaaaaagaattctatagaaacaaacacacaaaaaaaacctgttgaaaaaggaattcccatttatgttccaatggaaagacccatccaaaagactcacctggttatgctaagtcaacttataaatccattatgaaaaccacttctaatgtcctgatcttggtctaatcttctaaatcctcaggctgatgataaactcagctacagttaagtagttaatacagctgttgtacactcaaaataacgtttaatctttaacttttaattttgtcacagcagttttatgtattataccattcttaccccttcgtaattgccctttaactgccagcttaaatactccaatcacctaaataaaagcatttcatccacaaatccaccaaaaccagaaaaggatactaagaaattttaaaaggcatatacatcctgatacctttatttttgccattctggatatcaatcatttcttaatacttttaaattagctggaaatgaagcatcagccctgatttggctgtaagtttcacatatttaaaatgtttcttttttttttaagtctacaaaataaatttagatcaggaatttttaccaatgtttcagacatgcacaagaagttgtgtttgaagccctaccaacatactcaaatatatatattatttttaaatatatatttgaggatacatatatagtgcatgtatatatgtatatgcacaaatacatatacacacacacacatatatgttttttaattggaaaagcactcgtatctactcacaaccagtgtctttgaggcggttgatggcattggaaagaagacgaacacaaccgagaaatccagcaccttgtttcttatggatcttcttgtgattccatacactgatcgtaactgaatcagactttccaatatacctaaaaaacaaaacggctgcatgagtaacttggtagttacaggcagttggcgtaaaatttttcttttgttctttttatattctaaagttactaatatgcttcagaatctggctagattatgcaaaatatgtcttgagttaatccacaggattgaatttaaatttttaaaaatcttgaaaattttagtatatttttatcacatctgccactctcaagctgggctataattctagtcagtaaaaaggctattttagtagctaatgtctaataacactaagggagtttattaaataacttctttgcaagaaaaagaatcttaaaaacttttatcacagtcacattttaaatacatgtcgatgacatgacctacttttcaagggatagtgtcaaggctgacagaccaaaaatctgacctacctgttatattttaaaatgctgtagaacaaaagctgtttgtaacgcttttcccctgcttctttcctgtatgcaggccttgagcgagcaggactcttgcagatttcacttcactgcctgcagacaagcagagcagggaaaagcgttactgtacttgtctgtgcatatgcctgtaagtatgtaaaagctctaccacagccaattgttaacatggcatcaacccatgcaaaaagataataaaataacatgtcagtagaatcctagctctatttcaatgacaataagaggtcaaatttttggtccagcaaccttgatcttaaagtatcattcaataaattacaatatcagaaaaattcacctagtatacagaaaagcctaaaccatttaagtaaggactaaagcttttaaataagtgacatggaaggtacacttgagccccgggatccagctgtgcctaaaaaatgcccaccccaggcttttaattatgcaaatcagtacattcccttttaaaaaattaagccaatttgaatttggtctctgttgcttgcaaatgaaaaaatctgaattaaaatattgttcagtatgcatgtaccaattttcgaatacacctaccagttctatcttggcatgtatctactggcatgtaattccagagccagaatcaagtattaagtagctgaattacccaagctgaacattttttaaaaagttacattaggccgggcgcggtggctcacgcctgtaattctagcactttaggaggccgaggcaggcagatcaccagaggacaggagttcgagaccagcctgaccaacatggagaaaccctgtctctactaaaaatacaaaaaaacttagccaggcacggtggcatgcacctgcaatcccagctacttgggaggctgaggcaggagaatcacttgaacccgggaggcggaggttgtggtgagcctagattgcgtcactgcactccagcctgggcaacaagagcaaaactccgtctcaaaaaaagaaaaaaaaaagttacgttaaaccagttgtccaactagtaagcctggtttacaggtatgctgaaatacatatattgattacctcagtcctcagggcaacgcaccactggcttaagcaacttcatctgtgtagtccaatgtgccatattttttatgtgtaccatgatatgaaaaggttgggaagctctacattaaatcataataagaaattgctaattatagaccttctggaagatagcctaactctgaattactaaaaattatgaaatatattgtattacttaagcgtacatgtcacaaacattctgtccaaatattcctgggccagaaatgaatccaaaatattaccttttcttatacatagagaagtacatgctctcactttaatgaaacctcatgtaatataacatacatggcaacaaaaacagtaaattccttttgcaattgaaagttaaatagagggctctattagcttctattaaaactttgacttactaacaaatacatgatttataaacaagtttcaggatgttttgttgaaagggagagagggacacctctataggtgaatacaatgttaccatatagaccaaaatatgtactcaggattttgggctaaaatttaattattagattttgtttgtatacttagccaattaaaggcaagggttttgtaaaatgactttggaaacaatcataagagatgcttctgacagccaattaatattaattgtaagataaaacctaataagtacaagaaagatgttcaacatcattagtcatgatgcacctcaaaaccatgaccagatacaacttcatacccactagggtggccacaattttttttaaaagaaaataacagtgacagaggaataaagaaacttccagtggaaaacaacagtcatgaaagatcaaaatcaggatgccatcagcaatactctaaacctacaatttccaaaatggtacccaccaaccacgagacccttgaggacttcaagtgtggctagtccaaattgaggcaagctgcaaaataaaccactgatttttttttttcttaacataaaatgagaaaaccgctgattttttagagacatagtaaatatgtatatatacatatatgtgtaagtagctcaatatttttatactgacatgttgaaagtatttttgatatactgaattaaataaaatatattattatgcttcattttaagaaacagggtctcgttatgttgtagctggattacaggtgcaagccactatgcccagtttattatgcttaatgtcatctgtttctttttacttatcttaacgtggatgctaggaaatttaaaattatagatgagctcccatctgtgccttacattatatttctactcaacagtatggatctaaacctagaagataatggagcaatgtattcaacatttggaggtaaagtgatatttcacctagaagcctatattcaaaccatatcaaaagataagaagtcaaagtatatcttctgataagatctcaactttcttcccatctttgtattatttctcaaaatgacaatggaagataaagttcaccgaaacaggagagtaaacaaaaaaaaaaaaaaaaaaaaaaaaggaagtcactaaacctagaagagacaaaggaaattgccaacataacaataaaggcaagtcccaggacaactgcgcagtgggtcttagagaaccatcacacaagactaaagaaagagaacacagactcccaggagggttatctccaagaagaaaaaaagccaatggaatactgacagaactgaatatatggagaaaagatctttagttctataggagagtctgaggattatgacatataacttctcatttctatctaggagataaatagataactaaacaaatgggaaaagtagctactaacttcagaaaaaacaaaagttgtcaagaaagaaaatgtaattcttgtacccctgtgacccaactatggatatttacataatcataataatgtaaacatggaacaatggtttaaccaaaaaggttcatataattatattggaagactaaagaaaggaagaggcttgtgtcatgagaatggggatgctgaataccaattttaaaagctgaaccactgggctgggcatcacagcccacgcttgtaatccaaatactttgggaggccaaggagggagaatcttgagcccaggaattcaagaccagactgggcaatatagcaagaccccatctctacaaaaaattaccttaaaaaaaaaattagctgggcatggtggcatgcacctgtagttccagctactgaggagggtgaggtgggaggatcagttgagtccaggagttagaggctacactgagctatgattatgccactgcactctggcctgagcaatagagtgagactgtttctaattttaaaagaatttttaataataaaaaataaagccgaatcatcttctaggtaggaaattcaaaaatacctaaaactaggctgggcgcagtggctcatgtctgtaatcccggcactttgggagaccgaggcaggcggatcacttgaggtcaggagttcgagaccagcctggccaacatggtgaaatcccatctctactaaaaatacaaaaattagctgaatgtggtggtgggcacctgtagtcccagctactcgggaggctgagacaggagaaatgcttgaactcaggagacagagattgcagtgagccgagatggtgccactgcactccaacctgggtgacagagcaagactgtctcaaaaaaaaaaaaaaattacctaaaactaaaaaaagaaaactgtgatgctataaaataaaatacatatctagaaacagatgaaaataccagaataaacagccaaagttattaaagcagttgccttgaggatgggaatcaggaatgagaatggagcagggaacttgctgttttccagtaaaagctttattgtatcatttgcctttttaaaaaggtgcatatactccaatggtttaaaataaaatttaaaagaaagaaaccatccatataaaggcaaaaagaagcctattcagtgcaacccaaatccttatttctggttttataattggtctaaagtggtgaattaatacctttatttaattgaaaaaagaggtgggggattgctctactgtgagccagtttcattttcttcttcatagaattttagagatacctcatctttcaaaacctgtctataagccaaagcacattcccactgggcttttctttaccccttttgtgatgaccaaattataccacagatgaaacccagatcatttcccatgattattttcaaagactatatcaaataatttaatgatatgttccatttcaaactaattgttgaaacctacaggtcataatgctgattccactttggatcaagcgtattcttcacagtatctgtagaatggcattgcccagatccatcaaccaccaccttagcaaatggatcaggaagtcctgtgaaaaaagattttctaaaattaataatttgacatttaagatagaagattaattatacaagcattccatttgctacaaaagattattccattcttttaaaaaagtttaacatttagctataaatgaatagtccattttttaaaaaaaaagactaaagttacttctacattaaataccaaaactatattttttctcgtttctgtctcaaaatagtcccagtttaaactaccaaaatctagaggttacctcataatgtggaagtttttaataggttgttaccagccctctgacccgaggaatggggtcatgaatggttacatgaattcttgtaaccattcatggctttttctttccaaatgtctccctcagtagctcatttaaagaaaaagcttattaaaggtttttatacaggaacacaggctacagagaaatcaaattagcaaatgagttttgctgaataactaccaggaaaaatcagactgaaacaaaagatgtaacactctgccttaaaagagcttactatctaattggaaaaataaaaatactatacatgaaaaacaaaaccaaaaatacctgagaataaacaagtgcttagtgatactgattgtaacgcaaacacttatatcactatgttaggtactattctaaatacatttatccttaatccttacaataaccctacgaggtaaacactgttattatccctattttactgatgaggaaaccaaggcacaagggggtcaattaactagcccaaggtcacagagtagtaaatggcagggccagaatctaaagtgtagattctaaacccatgtctggctctcgacttcatgctcttaaccactatgctgtattttacctcttatttactacgtggtccaacagtgagtacaagtaagagctcagaaaaacaggagaaaaggtttgaatctgaacagtaaagaaagggctttgagggaggagggaactcatctgggctttaaggcaggcgtctccaacctctgcaccatgggccggtacaggttcgtggcctgttacaaccggaccacaaagcaggaagtgagcggtgggagagtaagcattacagcctgagctccgccttctgtcagatcagcggcagcattagatgctcataggagctggaaccctatggtgaactgcgcttgcaagggatctaggttgtgcgctccttatgagaatctaaagtctgatgatctgagatggaacagtttcatcccaacacatcccctgctccccatgtccttggaaaaactgtcttgcatgaaaccggtccctgtgccgaaggttgggggctgctgctttaaagggcatacaggagaaggaggactttcctagcaaaaggaagagcaccaaggagggtatgacaatacaatatttaaaagactttgaagagtctaaccaaagagcttgtgctaaggtgtaaaagtaaatactattggaaatatgactgacccagtaagagaggcttaaaagtcgggcaacagggcttggactgattgaggtagataacagggagccatttcaggttcttgagcatggctgtaactacagtcatatttttctatcagtggtattcagggcccactaggagaaagaaagactagaggcagaccatatatgaagctgttgtaattatccaacagtaggatgaaaagaccctgaatgagggaagtcatgtggaaagggaaaggaaatgacaagagagctattctgaaagatctaatacaaattaataagaaacttgtatcaaagatgacaatacagttttcagcccaaagcaataatgaaaatgattcttttgacaaaaatttaaaaggtggaactaaaaatgttagagagacaaaaatgtcacttcatgtgttagacattgggatagagtagatttcctgtggacagctgaaaatactagaacaaaacagcgttaagtgttggtgactggagaaattttgcatgttggtatcaatgctaatttttttaagatactaatttgccaagtttcaaggacagacaaatcacctatcagttccccaattctatgattctgtgatctatcgcttccaaataataaaggaggaccaaaatttaggcgttaagtttcaaagaaacttggtaagttagggtattaaatctatttgactatattgttcttgaagctgagtgctatgcatagtatttcagtaacacctaaccatttataaatgtgttcaatggaagaatgtttttacctccaccctcaataaatgaagatttcctcctgggaagaattcactctatcttgttattttcactctactatttaaataaataaacatataaatgtgtatttatgagcaaaaacaaaaaaatcacatttctaaactttccctttgggtgttattaaactagttgaagaattaagtctctctggtttcttgcttttttaaaaaaataaaatgaaaaagaattaaggactggccagacacagtagctcacacctgtaatttcagcactttgggaggctgaggcgaaaggatcacttgagcccaggagtttgaaaccagcctgggcaacatagtaagaccaccccccatcccccacaaaataatttaaaagttagccaagcatggtggcatacgtctgtagtctcagctactcaggaggctaaaatgggaggattgcttgagcctgggaggccgaggctgcagtgagccatgatcatgccactgcactccaacctggttgacagagcaagaccctatctcagtggaaaaaaagattaaggattaagaaaaacaacagctgacaaaggactaatatccagaatctataaagtactcaaacaaatcagcaagaaaaaatcaaacaatcccatcaaaaagtgggttaaggacatcaatagacaattctcaaaaaaagatatatcaacaagataggccaataagcataatgaaaaatgctcagcatcactaagtatcagggaaatgcaaatcagaactataatgcgatgccacctcactcctgcaagaatggccataatcaaaaaatttaaaaataacagatgttggcatggatgcagtgaaaagggaacacttttacacggctggtagtaatgtaaactagtacaaccactacggaaaacagtgtggagattccttaaagaactaaaagtagatctactgtttgatctagcaatcccactactaggtattaacccagagggaaagaagtcattatacgaaaaagatacttgcacacgcaggtttgtagcagcacaactcacaattgcaaaaatactgaagcagcccaaacacctatcaatcaacgagtgggtaaagaaatgtggtgtgtgtgtgtgtgtatatgtgtgtgtgtatatatatgtttatattatataattatatatgtatatatttatatataattatatgtgtgtgtatatatatatatacacacctacatatacacacacacacaccacatatacatacatacaccatggaatactactcagccattaaaaagaaataatcacagcaacctggataaaattggagactattattctaagtgaagtaactcaagaatggaaaacctaacatcgtatgttctcagtcacatgtgggagctaagctatgaggatgcaaaggcgtaagaatgatatactggactatggggactgggggaaagggtgggggtaacaggggataaaagactatacactgggtacagtgtacactgcttgggtgatgggtccaccagaatctcagaaatcaccactaaagtacttattcatgtaatcaaacaccatctgttcccccaaaacttattgaaataaaaaaataaaataataaaagaaaaacaattttttccatacaaaatgtggcttccagatccttaattaagtaggaaagtcacagccttttatgttccctttctgttaaataacacagtaaacaaaaacaccagttcaataccttaataaaaaaatacataggtttcaacttaacctgattatattattctccaaaaatttaacttgagagccaagttactcccatgtggtcaaaaactatcaggttttctgaagttagtgagacatctagtggtaaacacaaagtggctagagaactttctgcattttaaaaaatttctcagccaggcacagtggctcacgcctgtaatcccagcactttgggaggccgaagtgggtggatcacgaggtcacgagttcaagaccatcctggctaacacggtgcaaccacatctctactaaaaatacaaaaaattagccgggtgtggtggcacatgcctgtagtcccagctactcaggaggcagaagcagaattgcttgaacctgggaggcggaggttgcagtgagtcgagatcgcgccactgcactccagcccgggtgtcagagacagactttgtctcaagggaaaaaaaaaatttttttttgtctcaattctcccccatcatttctgagacatgtaaaatagctaaagctcaaaaacctccttactacacaaatgcacttgaaaagctgcaaataataataaaataacattttcaactcaaaagtgtgctaccttccaaagaaaacagcttcattttcaattgggccaagaaaaaaaaaaaacatacacaacatttagccaacccatcttggttttaaatgacttcaatttggccccctataaaacaccttattaccttacacagaaatcttttttaaaatgttgcagaagaacaaatctaaatgaaaacattccttttcatataaaaaatacacataaaacagataatgaaggcagggcacagtggctcatgcctgtaatcctagcactttgagaggccgaggcaggcggatcacatgaggtcaggagttcgagaccagcctggccaacatggtgaaaccccgtctctactaaaaatacaaaaattagctgggtgtggtggcacatgcctgtaatcccagctactcgggaggctgaggcaggagaattgcttgaacacgggaggcagaggttgcagtgagccgagatcacgccactgcactctagccgggggacagagcaagactccgtcgggggaaaaaaaaaaaaaaaaacataatgaataaatgggtaaatatgtgataaagttaatggtagaatctagatggtgggtctttactataaaattattttatctgttgctttatgtttgaaatttttcctgctaaaattctgggggaaaggggaagtgacttatttttaaaagccaataagcttgaaaacagttcaaaaacatgagttaaaaaaacttttctcaacaaggatagcgcccaataaacagtattacctcacatacaaattactcttcaaaagacaacacatggcagtgtattttttcctgcgatgaaaaatatatatctatttcatcaccctatagtcgtactttgtattaaaatttgcttttctcattcaatacaattttaactgaatcgcaagcaaaaacttaactatattttactattaataactgcactgatcaataaacacacattcatttatatttaattgaagaatttaggaattactgtctctgaaattaatgtgggcaacccttaacaggtcaaaaatctgtataagtatacatgtaaatctaccacagaatggacctgcgaccttggccagtgtgaacctgggaggtaacttccattcctggctaactcccctctgaagccctaaggattaccattcctgtttctctttccaggccatcaagagtctcccattctaagttttaaagataatcacactgtttcccctaatcttatccctaaagcaagttcacactcttagaatttttatcaatttttactgcctacacccatgaaaaagggaaaagatttccttctttctttcacttacaatttaaggacaaagatcatataagggttaacaatcagctctcaaaggtttataaaacattaatatatgattcctctagatatcctaggaaaaatgaggtaagaatatctggatattttattagagaagctgtgtcttgggactcgagaggaaggaaatttgaaaaggaaagctgggagacaaaactgaagattttatcttcaaaaccagagcagatgtcttggagagtgcagaagcagctgtaagagtgctcctctcagccgggcgcgatggttcatgtctataatcccagcactgtgggaggccaaggcaggaggatcacgaggtcaggcattcgagaccagcctgaccaacatggtgaaactccgtctctactaaaaatacaaaaattaggcaggcgtgttggcgtgcacctgtaatcccagctactcaggaggctgaggcaggagaatcgcttgaacccgagaggtggagtttgcagtgagccgagatcacaccactgcactccagcctgggcaacagagtgagactccgtctaaaaaaaaaaaaaggaaaagtgctccccttacttccctcccttttctccttgtccaaccctatttgccactttgcaagcccactagtataaatcctaccttagatcaaccttatcaaaggttaaaaaaaaaaaagtacacctcagttagtagcaacagggatgaggtaggaagtgagcagcagcctgagacagataacagtgattggaggcaacagggagagatgggaagttctgtggccattgggaccttccactgtgacaagcttctggcgagaaggcacatggtacataaatttaaactgcttataatttgcgtcctatgttccaaattatcctatttgctttctcatataagcagaaagataaccataaacatttataactatatagttttataagatgttattttataaactttaattcaggttctgctctacaaaaactcaaaataataaaatttcaagtggaatgaattaagtataattttaaattatattggccgggcacagtggctcacacctgtaatcccagcactttgggaggctgaggtaggaggatcacttgagaccaggagtttgagaccagcctgggcaacatagcaagatcctgcctctacaaagaatagtaaataaataaataaataaattagctggacgtggtgaagtgtgtctgcagtccacccactcaggagggtgagataggaggatcccttgagcccaggagtttgaggctgcagtgagctatgactgtgccactctactatagcctgggtgacagggcaagatcctgtctctaaaaagaatatatatatatatatatatatatatatatatcttatttcttttaatcaagcccctgaaaatcatctactatcacatgaaatcaaacagcacacatagcccgtgacttgaatttaaaaatttaatgaatcatctctattctaatttcaaatgttttacataaaaaattttgttggctgaagtttttttttttcactaaaaattatatcatttttaaccaataacttaaagctacaacagaataaagattgtaatatacatgctgggtacttcccaatcccctctcataaaacttagtactaaataaagccagaaaaaaaaattacaacagattggtaaatataaggcatatatgggaaccaaacatctgctttggaatctgagaggtaagagcatctaggatcaaatgtggcagagatttctttcccacactctggaaattccaagcaggctcaatgacttttctaccttccaatgaatcttgaatgagtaaagtttcccatgaaattttcaaaaggaagaaagtgttcacaaaataatctcttaaaccttttctagaactctagtagtatgcacaccttcaatatacattacacacatctgcatttacacacctgcatacacactcattctcataaatacgtgggagaggtgaataaaaggaaagggctaagcctaaaaagcacaaaaccttctaaaaaaaaaatgtgatgccaaatggctctgaaccgaagcattcataataaaataacactgacaatacttctgaatagagaaacccctaaaccagagaattctgaaaacgctgttcccaaagatctacatacaatacacaagatttaaagttaatttacttacggaaaaaatcctttttcaccaggttttttgcacagagtactgtaaaaaaaaaaaacaaaaaatacatgggaaaaattaaaatgttaagagtgtactgttacattttaaaacacggaaaacagcagtgaatagttaaaccctaactatagcaaggtatgaaacatgaccacaaactttcgaactagcaaataaaagacagttgaaccagtggttgcaactttcaatgatcaccagtaatagctgagggcaagaaagtttataaatctgatattctaataataaggtagaaattcaattcctatcttccatcaagatctactctctgagaaactcagtggcaataggaaaaatagttcaaaggagatatgtaaagtcaggttgttatatctattttaaggatgaaataattttatactgaagaggatcacaaataaagataaagctttcctgatatagatgagttttttttctttttttttttttttaaataacattctgttctccatctaaatgccacagaaacttcatgggagaaatcaaattaccttctcctaaatcatcagttaaatgacaagatatgtctactatatcttttaagaatttaaagttaatatattaaaactagatatcccaaatccacattttccaagttaatatgcattaaattacttacacggatggatgctcaaccttgtgaacacactaaaaaatattgaattgcccactttaaagaggataaattttggccgggcgcagtggctcacacccgtaatcccagcactttgggaggccgaggcgggcggatcacaatgtcaggagttcgagaccagcctggccaatatggtgacaccccgtctctactaaaaatacaaaaattagctgggcgtggtggcgtgcgcctgtagtcccagctactcagtagactgaggcagaagaatcgcttgaacccgggagagggaggttgcagtgagccaagattgcgccactgcactccagcctgggctacagagcaagactgtctcaaaaaaaaaaaaaaaggattttatagtatatgagttacatatcaattttaaaattactgcttacaggctgggcacagtggctcatgtctgtaatcccagtactttgggaggccaaggtggctggatcgcttgaggtcaggagtttgagaccagcctggctaacatgatgaaactgtgtctctagtaaaaatacaaaaattagctgggtgtagtggcgcacacctgtaatcccagctactcaggaggctgaggtgcgagaatcacttgaacctgggaggtggaggctgcaatgagccaagattgcaccactgtactagtgagccaagattgcaaccactgaactccagcctgggcgacagagcaagactctgtcataaataaataaataaataaataaataaataaataaataaataaataaatctgcttatagagtcataaacttaaaacttctttaactcaaacttgatacaagagaaagaaaaacatcaattttcatatatgtaaattttagttcataaaatacctatgaatgtaatgtttggtatttctatccacttctactaacagtttaaatgaattacagttattggaagtttagtgtataaaagctcatttgacataaacttgggaatgaatctaaataaatataactaatcactctaagggttcacataaaaaaaccttttgaaaacagatgtcatcactaaataaataaaattattaagtaagcacaagatactggtatactaggcagagtcccttaggccatgtcttagagttttgtttttaaaaacataaaaactcaatcaatcatgaaaactagggccataactaagaataagaaatcacaaactagatttagagaactcctccccaaacttttgtcataatataaattgaacagaatactcaggatcaatacacatgtaacacacacaaaaatctaaattacaatcttcagttttaatgaggtaatgatgatttttttaaacaaaccactatcctatgattcatgaagtgaaatgatttcacatccgacttcagagaaagagaaaacatgagatctcctccaactcactgccaccaaacctacatattcattctttttcccttccttccactgacaatgtctactgtcctctctaagactatcctctatctcatatctaaaccaccatgttctcggggatcttcacagctgttatacatatcctctatcttgtccccttttctaatcaccttgtcaacatttaaacatactcaagtcttacccaagcctcccttcagccagccatcatctacctcttccctctcataatgaaacttcttcaaagaaaataaatgtgcaaaaatcacaagcattcctatacaccaataacagacaaacagagccaattgctataaagacaataaaatacctaggaatacaacttacaagggatgtgaaggacctcttcaaagagaactacaaaccactgctcaacgaaataagagaggacacaaataaatggaaaaacattccatgttcatggataggaagaatcaatattgtgaaaatggccatactgcccaaagtaatttatagattcaatgctatccccatcaagctaccattgactctcttcacagaattgaaaaaaactactttaaatttcatatggaaccaaaaaagagcccacatagccaagacaatcctaagcaaaaagaacaaagctggaggcatcacactacctgacttcaaactatactacaaggttacagtaacaaaaacagcacggtactggtaccaaaacaaatatatagaccaatgtaacagaacagaggcctcagaaataacaccacacatctacaaccatctgatctttgacaaacctgacaaaaacaagcaatgggggaaaggattccctatgtaataaatggtgttgggaaaactgactagccatatgcagaaaactgaaactggactccttccttacaccttatacaaaaattaactcgagatacattaaagacttaaacgtaagacttaaaaccataaaaaccctagaagaaaacctaggcaataccattcaggacacaggcacgcacaaagacttcatgactaaaacaccaaacgcaatggcaacaaaagccaaaatagacaaatgggatctaactaaagagcttctgcacacaaaagaaactcatcagagtgaacaggcaccctacagaatgggagaaaaaatttgcaatctatccatctgacaaagggctaatattccaaatctacaaagaatttaaatttacaaaaaaaaaaaccccatcaaaaagtgggcaaaggattatgaacagacacttctcaaaagaagacatttatgcagccaacaaacatatgaaaaaaagctcatcatcactggtcattagagaaatgcaaatcaaaaccacaatgagataccatctcacaccagttagaatggcaatcattaaaaagtcagaaaacaacagatgctggagaggatgtggagaaataggaatgcttttacactgttggtgggcatgtaaattagttcaaccattgtgaaagacagtgtggcaattcctcaaggatctagaaccagaaataccatttgacccagcaattccattactgggtatatacccaaaggattataaatcattctactataaagacatatgcacatgtatgtttattgtggcactatccacaatagcaaagacttggaaccaacccaaatgcccatcaatgatagactggataaagaaaatgtggcacatatacaccatggaatactatgcagccataaaaaaggatgagttcatgtcctttgcagggacatggatgaggccggaaagcatcattctcagcaaactaacacaagaacagaaaaccaaacaccacatgttctcacttataagtgggagttgaacaatgagaacacatggacacatggaggggaacatcacacactggggcctgttggcgggttgggggttagggagggatagcattaggagaaatacctaatgtagatgatgggttgatgggtgcaacaaaccaccatggtacatgtatacctatgtaacaaaactgcacgttctgcacatgtaccccagaacttaaagtataattttaaaacatttttaaaaagaactgcctacactttttgactctacttctttacctcccactaatgccctgatccactgcaatctggcttcctccctcaccattgcctctgaactgctgctacaaagccctggagacctaattaccaagtccatacaatggacatttttcattctttatggcacttgaccccctcatgggcatttgccactgctgactactccctcttctagaaaccctctcttccagttctgtttaacaccacattcacctggttctacacggcataaaactcattctaagttctctttgccagatcttgctgtgctataaaacttgaagttcttcagggttttgccctaggttctcttatttcactctgtaacctgaggatcacagtgtccatttttgtaaatcttgcaattatacgtaaactgttacatatatgtttattttctggggagagaatccacatttttcctgggagagagttcatagcttaatagattgacagaactcttcctctctctcaaaaaataaaatccgaagagccacttttccatatattctctctggtctttaccatttactctatggttatgatgatacctaaattcataaaacccgatccttagttttctcctgaactccaggtccacaaaccaaatatgcgttccccccaaaaatcacgtcttccccgcaaacctgctcctccctccagttgactttcttttcaataaatagccttcctttccactccactacccaagtcagaaatctccatagcaaccttcactgtattccctcctgacatcctgacaattacaattctcagcaattctacctcggaaatatccttcatctgtctacttctctctattaccgatgccaacaccttagtccaccatctactgtctaggtaattacaacattcccctgcctcaaagcctcacttctttccagttctccacgctggacctgaagtgagctaaaaatctaattaagtctttccatccatttccccttctaagatccttaaaacattccaaaggtcttctggcccaaacttatattggcttcaatgcccttcaagccctggctcctgctcacctctctgacctcatttttcatcaccacagctcccttccaggccctcaagtctaagatccagccacactaaccttcactttctcaaatgtatctctctcacccacagccttcacgtgccattctctctgcctgaaacattcttcctaggcttcttcacctactcatctcctggtctcaaaagggaaggatgccttttagaacatgtttctctcaagctttccccgcttgtattttcacagaagctcatacttttataaacacttatcacattttactgttctcgtttaagtttggaatgttgcttataattgcggaggtggtaaactccatacagcacgaatcatgcctgcctcatctcttcctgcaccaagcacacattacgcctggcacttgataggtactcaataaatatctgttgaatgaatgaaatagaccctaaaataatctaaataactttttatactatataacaatggccaatcctcacataatcataattttgatttaagaaatcttattttaggccaggtactgtggctcatgtctgtaattccagcactttgggaggccaaggcgggcagatcacttgaggccaggagtttgagacctgggcaacatggcaaaaccccatctctactaaaaatacaaaaaaaaaaaaaaattagccaggtgtggtggcacacacatgtagtctcagctactcaggaggctgaggcatgagaatcacttgagcctggaaggcagaggttgcagttagctgagatcacaccactgcactccagcctgagcaacagagtgagacactgtccccctccctccacccctcaaaaaaatcttatttttatcatttctctttacttaaaacatacttatccggtcgtgtttaaccaattcttaaaaaaaaatcacagaatgtttaacattcagtttcaaagaacaattgaaaaatcaaaagaacaaagaactttaaaatcaagttcaaagcttatgaggagaaattacattttagtaatcaagagattaaggaaaataacattagtgttctagaagaaacaagattaacttaaaacaaagaaataatatcaagattggtcagaccgctatgcttcatgctggatctaagcagttccagccagctttactaaattactttctgccctggaagcaaaaactctgatttgtaacttttaaaaggaagattgtcaaaacatgacctgagaactggtaatgttatttatctgtaaaaataaattgttttcacatcctggagcctttactgcactgttcttttttcttgggaatgtaccttggggactagaaccacagcccattgctcttttcattctctgttctaatcacagaagattggtaaatgctcaaagaatccatgaatttcaatatgacaaactcctgattatgtcaccacagcaaattctcaactaaggaggtatgtatcagaatcccctggagaatgtatatacaatattataattttatattaggagaaaattaatctatcatcttttgtaatagaaactatggaaagtagaactaagattaggaatcatgggactagggaggggtggcagtgtgggagaagtttcatttctgctttctaaatgtttcttaaagaaaataggtaaaaatgttgagaaatgctgggcagtaagggagtaacaggagagaaatcttgttaggtgggcgaggccagaacaaaggctatggggtacagactttttcctagaccgcagtccccaacctttttggcaccagggattggcttcatggaagacaagttttccacggaccagtgtgtgtgtgtgtgtgtgtgtgtgtgtgtgtgtgtgtgtgtgtgtgtgtgtgtgtgtgtgtgtgtgtgtggagggggggcagaggggagcaggcaagggggttttgggaatgattcaatctcattacatttattgtgcacttatttctattattattacattgtaatatataatagaataattatacaactcaccataatgtagaatcagtgggagccctgagcttgttttcctgcaactagacagtcccatctgggagtgaagaaagacagtgacagatcatcaggcattagattcttataaggaggggcaacctagatccctcgcatgcgcagttcacagtagggttaacactcctatgagaatctattgccgctgctgatctgagaggaggctgagctcaggtggtaatacacgatgggaagtggttgtaaatacagatgatgcttcactggctcatctcctgctgtgcagcccatggcccagggttgaggacccctggcctagacagcaatcagtatttcaatatctttaatgtttagtaagcttatatatatggaattgaaattatatatacagaaaggcacaaaaatctgaagtatctgaattaattcaattaattttcaccaatttttgtgttaaagcaaaacattatactggactacagatatttagtaggcacaagtcaatttttattagtgctaactacaaatgtagcattacaccaccacagtaccatgctgcagaatccaccagggacaatgtctcaaacagcccatatatttgtactagattaagtctgcttatactacttcatcatgttactacccttctcaaattccttcaaagcatttcattcttaagtctacactcccagaacctagcttgttctagctattgtactcactcctttttcagacagatggtttgaaatgattagcagagatgatcaaaatgaactgacatcagccatattggataaagcctctgcatttcacacagatgcaggtgtgatcatcttgagatacttagggagaaaggaatactcctacatcattcactctctcattcaacatttcctgaacactcactttgtgccaagtgctatgacagtttctgcagatacaaagaaaaataagacatagtcctttgctctcagagctcacaggtcaggtataattcaaataccatgtcataaatgccttttattgttgttttctcaagatacggttttaaactttatggaaatcttatacttcatttgaggcagcgattagagaaaaccatttgcagaagtacagatggcagtaaatactaccattttcatttaggtcaataatttatttttctggtaggaaaggagttatctatatgcaacaaaccaggtaatagtatcagagtaaatcgcagctgtagaaagagaatgctatgcttgttcttactgagttgttttcataatgaatggctatctacgcttaatgtgaataaagctcccaactacttagtatatccttgccaaaaattccccttcctcctccagattggagttgcattccaattacactgctgattggaatgagactgcttgagagaaaaaaaaaatactcagacatcccatcttccttcaccccacaaaaagattttataatactgtccctgcaactcaaaagtagcataaatgcttttgaacacagatttctctgcatgtgctttaaacttatgttatcattgtaaaataaaaccgaaattcaggataacattcctatacaaattccagcaggtggcccagtgcttcagaagtatcaactgatgtacaccattcctgaccagtggcacatgacagcaatttacatctttctgctctgagaaacagcctctatctcaacccctaaacatgaaatgaaaatgaaatttaaatgctacagaaaacttctacacaattttttatgtgttttagttattgttgcttgaaacaagagtattacacagattcacattcaaggtgttattacaaaatgttaaaataagcaaatatatcacatataattctatatgcataaaaatgatcagttaagtaaatgatagcaaacagcaagttgaaatattacacagccattaaagattatgtaaatgtatttatttattgatggataagaaaataatttccttttttttttgacagtctcgctctgttgcccaggctggagtgcaatggcgcgatctcagctcactgcaatctctgcctcccaggttcaagtgattctcatgcctcagcctctcgagtagctgggattacaggcatgcgccaccacactcggctaattgctgtatttttagtagagacagggtttccccatgttggccaggctggtctcaaattcctgacctcaagtgatccacctgcctcgacctcccaaagtgctgggattacaggcgtcagccaccacacccggcttagaaaatattttcttaatatgctattaaaagtccttttacatgtagtacatttaataaaatatatttttagtaaagaatataaacatattggataacatttatcaaatatttactatgtgcaagtgtacaccaaccaccctgtgaaataagtagtagtactaccgtcattttagagatgaggaaactgagattcaggcatagagacttaccagtgattttgcttttaagagctagagttggctgggcacggtggctctgcctgcaatcccagcactttgggaggctgaggtgggcggatcatgaggtcaggagtttgagaccagcctggccaacatagtgaaaccctgtctcttctaaaaatacaaaaaatcagccatgtgtggtggcaggtgcctgtatacagtctctgctactcaggaggctaaggcagaaaaatccacttgaacccaggaggcggaggttacagtgagctgagatcgcgccactgtactccagcccagacgacagtgcgagactctgtctcaaaaaaaaaaaaaaaagaactagagctgagattccaactcaagtagattaattctagaacccaaactcaactaccatatagagtgaaacatactctctcaggctagtacttccttttaaagaatcttactctaggctggcacagtggctcatgcctgtaatcccaacagtttgagacgtctaggcgggctgatggtttgagcctaggagttcgagaccagtctgggcaacagggcaaaaccccatctctacaaaaatatacaaaaaaagaaaaaaaaatagcccggcatggtggtgtgtgcctgtagtcccagctactcaggaggctaaggtggaagaatcacctgagcctgcagtaagccatgttcacaccactgcactctagcctgggcaacagaatgagaccttgtctaaaaaaaaaaaaaaaaaaaaaaaaaaaaaatcttagtccagttaaagcaattattggtgacacaggttcacaaaacggttaattgaaaactaggttacagaagggtgctctgcaaaagattcagaattctcctctttcaacagatatagtaatttacctcaacaatcatattagccctgcttttaagtaaatatcttgtcatttaatgaaggaattttaggcaattcatttcattcatgctgcaaaacaaactaggcccttaagtttaacttaatatattcagtacctggcaagtagttaatctaattagtatgtttgatgatgtattaaaagatacaggttctgaggtaattatcctaagaacagtatcagcatttaaacatttcaacaaggcaaaattggttctcagaaaatttattatatttttatttttttgagatgatctcactctgtcacttaggctggaatggagtggcgcaaacacgactcactgcagactccagttaaattttctgggctcaagagatcctcccatctcaacctctgagtacctgggactacaggcgcacaccaccatgccttgctaatgtctaaaatttttttgcagagatggggtcttgccatgttgcccaggctcaagcaatcctcctacctcagtctcccagactgttagaattacaggcatgagccactgcgcccagcctcagttaacaaatttaaaatgacctttctagtccactcatatcaaacaacttttaagtaactacttaaaaattttttttcaacaaagatgaagattttggtaaagttctcacaaacatgcgtactttttacattaataaaacaagatgagactatacaaataagctttctaaacactgagtgcaagtttatcaataatagatctactttgacataataaatgcagattttaaagaaatctagtcagaattatagattttattctagtcacaattataattttttttacttatcgtgatcagaggtaattttaaagtaaagcttatcttaacaagcataataatcaacttctggtgtaagttcacatgttaaaaataaaaaagggctgggtgcggtggcttacgcctataatcctagcactttggaaggctgaggtgagagaatcacttgagcccaagagttagagaccagcctgggcaatatagtgagactccgcctctaaaataaataaataaataaagtaaaagctcagctaaagccaagcagcacattcagtatgagataaatgtaaaacacttggtctaggtatctggtacatagcaggcactctacgaaagctattattttgagaaaccatctgaaaggatttgttatatatcttaaaccagtatttctgtgaattctttattcctatatgaggatgaaaatacacaaaagtaccgttctccattcaaaaattcaccatgacttaaagacctatgctgtgtgcagaccaaacattatcctgtctgctgctgctggagactcaaccaccaccttctctactggactccttcattcaaacagacccactcataactgatggctgttcaagagatgaatattgtatatttaaattaaaccacacaatttactttcttcataaggatgccgagagaaggaaaccttattgtaaagttcaagtatatacttgcaatgaagcctaaacattattttatatgtagaaaaagacttgcatcactttttggccactcccaagtttccttcctttaccttctttttctagagacacttatagaggcagtgtaatatagtgtgttaagctataagcactataaaagagttaaataattagggtcagaatgcatgggtttgaacctggtgctatcccttatgaacttgtgaccctaaaaactacttaacttctctttgcttcagatagctcatctgtaaacatgaggacagaaggatactaagagccacctcatggtgttgttttaaagattaaacaaattgaaacacagagaacatgagaccagtacctggtacacagcaagtgctcaataaacactggctattattattactcaactctaaaatttctcataaaattaacctacgaggttgcaaacacattaaaaaagaacatggccgggcacggtggctcatgcctgtaatactaacactttgggaggccgaggcgggcagatcatgagatcaggagatcgagaccagcctggctaacatggtgaaaccccgtctctactaaaaatacaaaaaatttgccaggcatggtggcatgtgcctgtagtcccagctactctggaggctgaggcaggagaatcgcctgaacccgggaggcagagcctcccgtgagccgagatcataccactgcactcccgcctgggtgacacggcgagactcttgtctcaaaaaaaaaaaaaaaaaaaaaaaaagaagaagaatataatttggcaagacgtttgccttagccaaaacaaataccatagattaggtggcttaaacagcaaacatttgtttttcacaaatcaatggaggctgagaagtccaagatcaaggtgccagcagagtcaatgtctggtgagggccgtcttcctggtttgcatactcccaccttctccctgtatgcttgcatggcccccataatctctcccatgtctcctgttataggggcactaatcctattcatgaaggctccaccctcatgacctcattacctcccaaatgcatcaccttcaaataccatcacattggggattaggcttcaacataggaatattgggggacacattccattcatagcaaagcttatgtacctagcaagctttcagtaaatgctgttaattgagtcccaatctgtttctctagcctcactctcttcccaagctccgaactcatacacccatttagattcctcaccagcacttcaaattatattttttcaaaatggaattcatcagcttccctagtgaacctgctcttctttttgacctccgtagtgctgtgaactgcaccacgtttccagtcatccagaaagcaatgtctttatctctcttcctctccctgaccacctcacatacctaaagcagttgccagattatagccggttatcacatacctctgcttatctccatttccagtgttcacatttaaataatacatctagagtattttacaatgtgccaaaaaacttctacatagattgttttctttaacccctaaagcttgtgagttatctaatatccacagaaaaactgtaagtgaatgttttggctcacccctaactgccacctaggaaaagagtttaggcattgtgaattcaggctccatcctatttttctataaatccttcactcaagcagtgtcaatgattcctgttttctctctcattaacccctagactgacaagctcatcctcttccctcaaataagcccaggacttttctgcctttgcctttattcataatgttcttcccaccttaaatgttattatcccaaccactggccctcaaaatcttatccattcatcaaacttctgtgaagccttttctgactctcctttttcagtctgattttgatctcttccttcccgtgaacctccaacacttggattctacttgttttattatagtgctttctcattttgcttgttaaagttattcatgtgatgtcttacctctgtctcattaagctataaacctcttctacagtttattatataatatcttaaacataatatgcaaatacttgttgaatcaaataaaatcctcagaaaaccactgacgagttataaggatgtgcaaactaaaaggtaaaggatacatgcagctcactccttgtttcccctaacctagtaactctttatgttcaaatcaggatggcttccttaactattcataagtactctgcgtacccattccttagggcccaactacttatctaataacagatctcactgagccttctctctcattcacaatagaaaagtatattgtcccataatgttctaaaattttatttgccttgtttctgtaacattgtaaacaaaggtaaacttccacatcttctgcattcttccagactctgaaaaactgtagtcactcaaatacctgatgatctactaagaaaacaaagtgcaaaggtatttagctttccaaatacgctccatttgaaaacacaggccacaagcacaaataggaaagaagactgcaactataaaaagcactgtaggctgggcgtgctggctcacgcctgtaatcccagcactttgggaggctgaggtgggtggatcacctgaggtcaggagtttgagaccagcctggccgacatggcaaaatcccgtctctactaaaaatacaaaaattagccaggcgtcgtggcgtgtgcctgtagtcccagctactcaggaggctgaggcaggagaatcgcttgaatccagggggcagaggttgctgtgagccgagatcatgccactgcactctagcctgggtgacagagcgagactctgtctcaaaaaataataataggccaggcacggtggttcatgcctgtaatcccagcattttgggaggccgaggtgggtggatcacaatgtcaggagttcaagaccagcctggccaacatggtgaaaccccatctctactaaaaatacaaaaattagctgggcatggtggcacgtgcctgtaattccagctactcaggaggctgaggcaggagaattgcttgaaccgggacccgggaggcggaggtagcagtgagcaagaccacgccactacactcagcctgggttacagagtaagactctctctcaaaataaataaataaataaataaataaataataataataataataataaaaagcactgtagtgagccatcatcgcaataataataataataataataataataataataaaaaaaagcactgtagtgagccatcatcgcaccactgcactccagcctgggtggcagagtgagaccttgtccccaaaataagtgataaataaaataaaaataataaatttaaaaaaataaaaataaaaagcagtataatttataagaaaatacttctatacaactatatatttttgaaataattcctgggttaatagggaattcataaatgtaataaactttttattttagaatagtttcagatttacagaaaagttacaaagttagtacagtgttcccacatatccacactcacttatcctatcatgaacatctaacattaatatgggacatttgtcacaattaatgaaccaatacattattatacattaatattatacattaattaaaattggtgttttattcagatttccttactttttacatactgtagaacaccgtaatacatttagtcatgtctcctaatgctccttgtggctgtaatagtttctctggctttcctattgtttctcagacttgttatttatggccttgatggttttgaggaaaatattggtaaggtattttgtggaatgctcctcaactgggatttgtctaacttctcatgattagacggggtttatgagttgttgggaggaagaccacaaaggtaaaggtaccattctcataacatcatatcaagggtacatactatcaacatgatttatcactgttgatattaaccttgacctagctaaagtagtgtttgtcaagtttttccactgtaaagttcctctttttccccctttctatactgtactctttggaaggatgtcactatacaaaacccacacataaggactagagagttatactatacctccttaagagtgggatatctacataaattgtttggaattattctgcatgggagatttgtctatcccctatctaatcatttatatcagtatggactcacaaacatttgttttgtactttgggttataatccaatactactttattttattgctcaaatttttccagctttggccattgggagctctttccattggttcgtgtgttcctttgacatacttccatcattgaggggaaaggaagagctctttcttactgatggaaaatgctctaggctcatttaagttccctaccctggcctcagaattagtcatttctccaagcaaccctaggaattaccaaatttaaacatccataaagacccaaaattttcaaatataaacagttgagccaatgaacccttcagctcctaaggtctaccttcactagatcattaagttccatgatatcaagaacttaactttgatctccactgtatacccagagtctagaaaaaagtgcacagtaggcattcaataactactataaacaccgaacctctgagactccagaaggtggctccagattgagtcataacataactcatcattccaatggaatctgcctagatttctcatgtttagactcctgttctaacaccactatgtctaattcactgcattgttttacagtaaacaaaaagcttcctttttccactgctcctcccttttattccatcgcaagccagaagttttgttaagtattccccagtaaaatttccagtgcaaaggaatatacatcacatttcctagattctttctataatggcgtattgccatttacatcatccttttccgagttccattgaaattaccatttttaacttgctatgtagagtttaaatgaaaggcataatgccaaatccttatcaacattagcagcagaagaaaaattactgacaaaaatctactgataccaagttggacataatgccctcaaaacacctagttagtatgtatgtaaaagcatctaaaccctaccaatattccttgacaaatctatacgtagacaggaaaaagcttaagttaaacgtaagttgtcttgtctatacatatttgataatgtgaagacatggttccctccatagcttatccatatatatgcaaaataagctaaaattataatggggtggttctactaaacaactttatgatataattacaatattcactaatttgtgatggcttgtttttcagagaaagttaccgcatgcaaaaataaagctacaacaaatgacacactactgactaaaaagcaagtctgataatcctacaatagagtcctccttcaaccttaatacgatatcaaaatgctataaattatactgccttaggtcaggcacagtggccaatgcctgtaatcccaccactttgggaggctgaggcgggaggactgcttgagcccaggagttcaagaccagcctgggcaacatggtgaaacctcatctctataaaaaaaaatttttttttgagatggagtcttgctctgtcatccaaactggagtggactggtgtaatctcggctcactgcagcctccgcctcccaggttccagccattctcctgcctcagcctcccaagtagctgggattacaggcgcacgccaccatgccaggcctctacaaaaaaaaaaaaaaaaaattaaaaaaattaaaaactagcaaggtttggtggcaaatgcctgtagacccagctactcaagaggctgaggctggaggactgcttgagcccaggagttcaagaccagcctgggcaacatggtgagacctcatctctacaaaaaactttttaaaattagcaaggtgtggtggcaaatgcctgtagtcccagccactcaggaggctgaggcaggaggatcgtttgaacacaggaggttgaggctgcattgagctgtgtgttcatgccactgcactccagcctgggcaacagagcaagacaggggaggggagggaaggagaggggagggggaaagaaaatagtattgcctcaataaaatatcatttatagagagtatgagccatagaggataagtgatctgtggccacatttgcagtatgtgatcctgacccactggccactgctaattggataataagcagctaccacatccagtatgagccagtcagatcctctctcttgggaaactagcattcacagccagtgcctctacagagaaggaagcataagcatttagaaagatggttctcctgactctagggggccactggtaataacaatctcagtttctgaggctttccagtttctggatcctgtctctccaaagccaggccacacaccttcccctttgggtgccaaaactatatcctcccaataatttctctttttgcttaagttagtctgaatgggtcgctttcctgttacttgcaaccaaaaatgtctgaagataaagggaatctgcagtgcttaccaaagcactgtcatatgccaaaaagcacacttaagcaaaaatgcaaatgtgttaaatccccaaatcattaacattttacaagttaaaatgttttcaaatgttagtcctaatcttaaatattaacaaaaatgacatgtgttcaaaaaattgctatgcagataagaacacatgaacatgcttctaatatacaattttgtattcaacacagatctctgttttatgacactagcaaattaacatagtgtagattatgagcccacatatgtagaactggtattggttggtgtatgtctactctatcaccttaaagtcatggtcctcatggttctcaaactttagcacgtatcttatctcttcctagagggcctgttaaaatacaccgctgagtcctaactccagagttcctaattcagtaggtctatatggggccccatgactcaattcccagtgatgccaatgttgctggtctcagcaccagactttgaaaaccacggccttaaataatggctctctacttttaggggaatgagatggtgatggtaaagcgctcctttgaaaatttaagaaaaactatgtacttagacaatacacacactttaaagggtttacagaaactcaaaagctcatccacatactcttccaaatgattctacattaagaacctcattaaagaacaacataggggctgggcctggtggcttatgcctataatcccagcaccttgggaagccgaggcaggcggatcacttgaggtcaggagttcgagaccgaaaccccatctctactaaaaatacaaaaaaatgagcaagacatggtggtgtgcacctgtaatcccagctactcgggtggctgaggcatgaggatcacttgaacttgggaggcggaggttgtggtgagccgagatcatgccactacactccaggctgggtgacagagtgagacacggtctcaaaaaaaaaaaaaaaacaaaaaacataggattatacatattcatgaagggtcatacatgtccatgcagggtcatatatagccatgttttccaaatatacttggaacttttacttgtaagttattttacacattcatcttgaattttttaagaagcacaggctatttcattcaagttactaattaacatagagcaggaagattctgttttaaaaacttacctgggccaggcgcagtgcctcacacttgtaatcccagcactttgggaggctgaggcaggcggatcatttgaggtcaggagttcaagaccagcttggccaacatggcaaaatcccatctctactaaaaatacaaaaattagccaggcgtggtggcaggcacctgtagtcccagatactcaggaggctgaggcaagggaatcgcttgaacctaagaggcagaggttgcagtgagccgagattgtgccactgtactccagcctgctcgacagagcaagattccatcaaaaaaacaaaacaaaacaaaacaaaacttacctgaacacaatctcactttgtcattaaaaaattgatgaaattataactataaaatagacaaaatctatatctagatttaacagaaaaacacttaggaataacattaaactatcacatgaaggacatgcacgtattcccctaaaaaaaaaaaacaaacaaaaacctctagattaaagctgatgtacaaatatgataggctccagtctttaagccaccgcaactgatactgagtgaggacaagctgatcctgccaagccctgtacaaattacagattcacaaacaaaataaatgttgttttaagccactaagtttttttccttttttttttttttttttttgagatggagtcttgctcctgttgcccaggctggagtacaatgacacaatcttggctcactgcaacctccacctcccgggttcaagtgattctcctgcctcagcctcccgagtagctgggattacaggcatgtgccaccacgcccagctaatttttgttatttttagtagagatggggtttcgtcttattggccaggctggtctcgaactcctgacctcaagtgatccgcccacctcagcctcccaaagtgctgggattacaggcgttagccactgcatctggccttaagccattaagttttgagacactttgctaaacattgttagataattagaacacctttagatgagttgagaaacagattaaaacccagtcaagctgacagttttctccattagaccacttttcaaagtatatagctactgaactacacgcagacctctcccctaatatccacatcctcatatccaaatgactactaaactctgacaaaccctaatctggacacctagtctgctgcggccaatgcagatgtaagcaggtgacataatcctaactcaggtatatcacatacaaaacagaggcagttagatgttataatttcataccacatgtatgctatagaccatctccagccagttccctgcttaccatccaacaaacccagatatcaccaccaaccaatcaagaacactcaaaaatttggcttttctaatatggaaaaggacagttcatgatcttttggctttaaaggatctccatccctgacagcgcgcttagactttgtgctggattaggcttcctgcttggcaataaagttttttcactcagtacacaatctttggtctccaacagtctttgtactttaacagtttggaagtcccacacagatcatatgactgagccatccgatgaagccaacaagccaccaacacctgagaacatagtaagccctggtttccatcaccttctgatggtgattccgctgactttatgagtttgttctgctgtctcgcaagtttgtttgaagccttctggtttcttgtgggtagacatggagaggaaatttggtctcttctttgagtgatacaaaaagagtgggtctattctgtgtatgttccattgttagtccacctgtgtcctaagagaatactcagaaaactcaaacgtttggaccagattcaaaggctggaggtcctagactactgggtctgcctcaactgactaagtattctatgtatacattttctatcaaatagtgaaataaatctcctttttggtatttgttatgggggtctgttaagtaaaagagtcaaatcctgtcaggactcctgaatcttttatgttattcattatagtccaaattcatatacatgtctaataagtactatggcaaaattataccaagaatagtttctaaattaccgcggccactttggggaacttgcaatttcaacgagggcttacactcccacaatgccttagaaccaaaggaggtaaaacccccaaagcaatagtctacattcttaaactctaacactaagacaaccaatggctcaataactcaaaattaacttccttgaaggattctctaacaagaggtaaagaaagggcagctctttctccgtgacttcctgccttgaaagctcagcctttaactcatctgctagaatcctaatgttctgactcttcagatgaggacctcacactactctcacaattgatcatcacagggctccctcacatcttcctgccttagatatcacagttctatctcctcccctgttactgagcacccatgtagtatgggacagacaaccccacaatttccattaaggacttacccccacccttcaaaagaaagccaggctgttgtttttaaactccagccccaggcaaaatccctaaacccactaaaaagaccaaaagttttctgagtttagaaaacttttacatatctaatactcccatgcccaccagaacctcacaaacttacagactactagtttccctaagaaggtcgaagatggttccaaaaaacaggttggaaccctaatgcagatcaggtatcactaatcagaagaaagtttaagaaaagtgtgtgtacacctataatcccagcactttggtaggtcagggcgggaggatccctttagcccaggagtttgagaccagcttgaacaacatagtgagaccctgtctctataaaaaaaatttttttaattagccaggcatggtggcgcttgcctgtagtcccagctacctggaaggctaaggcaaaaggatagcctgagcccagaagtttgaggctgcagtgagctgtgatcacaccactgcactccaccctggacaacagagagagaccctgtctctaagataaaacaagtagaaggaaaagtatctgcttcacaccatccccgaagtctttcttaccaaagtagattacaccaaaatcctaaattgcaagcagtcatttgtaatcagaagattttagaaacttttaggcaatatttttatagacctagaggcagagctaaatggccttttcagcctcctttaatggattaaaaccagaaatagattagtgggaagaatgtcagtggattggcaaataaattatctacatgaattacaacagaatattgtccaagaactctaaacaaattttttaaaaaccatatgtctcttcaaattaaacaactcattcaaagtctaacaatacctcctatgactggtagaggaaagaactgtcctggggggatgttgaatccataaataattcaggtactagaaaagtaatcatcctttaagaactgagaaaggaggccgggcacagtggctcacgcctgtaatcccaggactttgggaggtcgaggtgggcagatcacaaggtcaggagttcgaaacgagcctggccaacacagtgaaaccctgtctctactaaaaatacaaaaattagccaggcatggtggtgcacgcctgtagtcccagctactcaggaggctgaggcaggagaatcgcttgaacctgggaggcggaggttgtggtgagctgagatcgcaccactgtactccagcctgggcaacagagcaagactccgtctcagaaagaaaaaaaaaaagttaatacaaattaagtggttagcaaaaatcctagaagatatttatttataagaggcttctgatttttaaaagtcttcatgccctcatcaagtaaaaaaccacttcatttgagagattaccagctaactgggaatttctaaaaatataaggtcttactcaaattaaatgccacaaaagaaaaagaacctgttactctgcaagtgtgcagagagctaactggccaaaacacaagaaattagttcctgccatcacacccaaactggcgcaacaggttaggggtaagcagtaaggcagaactataatattgtgaaacctaaaaccttatatttaaaggctctactggggacaactactgggggcaaggggacaaatgacagtccacccagagttgaaacaattttagcagaaaaaggttttataactatccttagaaaattataagaattttgcctctcagaatttgcctctcattagctgaactgataaggataagaacaagttcctatacaaacttcttgaaggctccagctaagggctgtcctttatatcattgcggagaacttaaaacatatccttgaaggccctacttttcaaccagcactcaattatctctagggagtccttgaaaagcaactattagtcaaatgcagtggtaaggtcaagtcagaaaagtctgtttcatcagttagagcactagtatcctccctaagagcagcttcataagagtagtgggcaaaggctgggttagtgcataaatgaaaggtgaaggtcatgtgtagtggctcatgctgtaatcccagcactctgggaggccaacgcaggaggatcacttgagtccaggagtgcaagaccagcctgggcaacatggcaagaccccatctctacaaaaaatttacaaattagccgggtgtggtggcgtgtgcctgtagtcccagctactcaggtcaaaaaaagggagagagggacgggggtgaggtggggtggagagggagggaggaatggaggtgggggggagagagggggggggggagagagagagagagagagagagagagagagagagagagagagagacagagagagagagacagagagatgaaaacaaggatacacatcacaagagcagactactctttgtaaaggtcagacctaaaatgaagaaatgcaggggttgaaggaaatgggctaagaaaggactttaaagatgagagacacatgtggatatttaaattctgaaagaagataaaaagagtacttaataggacaaagttccagagtccagagaggagaattaactaaccttcacaggtgaggaacacaccttgactggtcatctttgaaaaccagcccagctcctaaaatctcctctctcagaacataaaatgcacttaaacaccccctcccaaaaaacaaaacaccatgaaacaaacaaaaaacagaaatttgacatgaccctaattccacctctgccctcattttcacactttttattggatgtaagaaatatttacacaataattaatatgcattgagcatttactacttctcagacatggtgcttatgcacgttatatggattagctcattaaacaccagacaggatcagcaacatggggtcagcaaaactgcactttgctatcatatctgcctctcaacatctattaaccacccaccaccctagtattattctaagactctctttttttgcgggggggggggggggggggtggacagaggcacactcgcccacgctgagtacaatgttgcgatctcggctcactgccaacctctgcctcccgggttcaagcaattctcctgcctcagcctcccaagtagctgggattacaatcgctcactaccacacccagctaatttttgtatttttagtagagacggggtttcactatgttgaccaggctggtctcaaactcctgacctcaaatgatctgcccacctcgacctcccaaagtgctgggattacaggcataagccaccacctctttttaaaaaggggtgggtgggaggaagcaaagctaaattttaatctccagaaattttgacttgccacatcaatcacaaatttatacattagctcagatgtccggagctagactggccaaagtgtcgtgcaatccacaccacatggttaataactgaccatgcccctacacactcctaacatcaaccctcccaggaaatgtgtgtctattaaaccaaatccatttccaattgacttatactcagggcagctgtgggaaagagagatgggcaggaaacaaacaaacaaaaacttctcttaattcaaaacacatagtcagcctatttgacctaaaacctggtcttaaggaagttacaaatgcttcctatattctcttttcagctgaaggggaaaatgagacaagtcttggggaaaaaaactgttcaaaggcctccagacttctgtcaagagacctaaacaatttaggaagacagtgtaacacagagcttagagacaggaataaaacacatctggtttcaaattccagcttcccacgcttaagagaagggctgtgagcccttggacaaatgacttaacctctctgagatcagtgttttctgatgacaatatgatagtatttgtactcgcctacttcagagtattattttgaggattaagtgagatgacttaggtaaagagtttcttaaaactttgcaaatagggatacacagtatttattgttataacagaaggtagaggctgcatgtggtggctcaagtctgtaatctcagcactttgggaggccaaggcagggagatagcttgagcccagaagttcgaggccagcctgggcaacctgaggagaccctgtctctataaaaacacaaaaattagccaggcgtggtggcacgcacctatagtcccagctacttgggaggctgaagtgggaggatggcttgagcccaggaggccgaggctgcagtgagccatgatcatatcactgtactccatcctgggtgacaaagcaagaccctgtttcaaaaacaaaacaaaacaaaaaaacagatctctacctatagattcttctatatccaggtactgggagtcaatcagggtccctcaaaatcaaatagaggaaagaacaacttcaaagagaaagcagagtataaaaacagagaaagaacactccctttccacttaaaccctccatacccacaccggtatcattccatcccaggtgaaaatgtttattagctgggtaaaaataaatacataaatccctttaccatatatttacaatacaatatagtaagaataaccattaaatatgtcatattcactttgttgcaagtttaaattccaggattcaactagcatcattggtttgtttttcacataacatgaattatcttacaacttcagttgattagaggcattagagaatcagtaataattctggtccctacaattctgagccttcaataatatgctgaaaacaccaaacaactttcaattctaaactttagaggtaacttataaacacaggcaactaccaagagattagccccccaccccccaaaaaaatgttgtgaagagttttatactctccatacaaagttactgtaaaaacataaaatttatataggctgagtgtggtggctcatgcctgtcatcccaacactttaggaggccgaggtgggcagatcacctgaggtcaggagcttgagaccagcatggccaacatggcgaaactgtctctactaaaatacaaaaattagccaggtgtggtggtgcgcgcctgtaatcccagctacttgggaggctgaggcacaaaaatagcttgaacccagaagctggaggttgcagtgagccgagatcccaccactgcactccagcctgggcgacagtgagactgtttcaaaacaaaaaacaaaaacaaaaagagaataactggctgctagcattcttggagctaagtaatacaagggggctgggagtttcaccatttaaagatgtggcaaatcccctcattttcagctgggcatttctttaccaccttccacagcaccaggtattcctgggtctataggcagtctggctttctccacaagataaatctttgacttttttgtgaggttgggtaagaacactcatctgcttgcctaggatgaggcatgtatagaactttccactgactttaaaccatttcctgctttcagcttcacatcttgcttgcaccctcagagatacctggcaccttcaattcctgagtcttcctagagataggtgatatgaactggctagaatcatgcaaggaattggtatccgcctctgtagatattttatattccactttctcagctaattaatctactccaaccaccttccatttccctgaagtttttttataccacttatttactgtctcctgttctttctgctcttgcagatttatgctgttttcattctcttactcactgtgaatggggcttggggacagagcagaaataaacatatttgttcaattcaagcttaaaaagaagacacagtccttgaatgatttttatctgatgctaatacatatcctgggtgcattcagatttcatgaagcctggagtttacagagtttggaggctccattttaagagcacagaattgggtattgacagccaatattcaatttagaatgagaaaataaatcataaattttaacaaactggcaaaagccacaaacatcataacctaataataataataataatatttgttatgacaagtttttttcccatttgtttccagataaaagtcacataaggccaggcatggtggctcacacctgtaatctcagcactttgggaggccagggtgagtggatcgcttgaggccagaagttcatgaccagcctggccaacatggtgaaattccatctctattaaaaatacaaaaattagctgggcgtggtggtgcacagctgtaatcccaggtacttgggaggctgaggcacgagaattgcttgaaccagggaggtggaggttgcggtgagccgagatcacaccactgcactctggcctgggcgacagagcgagactaggtctcaaaataaataaataaataataaaagtcacataacatgaaaatcaccaagttaaactgtataattcaataatttttagcatagtcacagtgctgtacaaccatcaccaatatctaattccagaacatttccatcaccccaaaacaacccccatactacctgttagcagtcactccccatcttccctcccccatcccctagcaacctgaaaatctaccttctgtctatggatttgccaagtggaattaaacaatatggctttttgtgtctggcttctttcaatcaacctaattttttgagctcatccatactatagcatacatcatcagcactttattcccttttatggctgaataatattccattgtatagatatgccatattttgtttatccattcagttgacagacatctgagttgtttccacccaactattttggctgttatgaataatgctactatgcacaagattttgtgtgaacatatgttttcagttctcttatgtatgtacctaggaatggaattgctgagtcatgtagtaactatgtttaatttttctgaaaaactgccacaaactgtttagcagagtggttgaactactttacattcccaccaacaatgtatgagggttccaatttctccacatctttgctaacatttgttattttcccattattatagcccttctagtggtcgtgaagtagtatcccattgtggttttcattttcatttccctaatgattcatgatattgggcatcttttcatgtgctttttggccactgatatatcttctctggagaactgtctattcaaaccctttgcccttttttttgaaatgtggtctcactatgctgcccaggctgttctcaggggatcctcccacctcagcctctcaagtagctgagactataggcatgtgccaacacatctggctagctgcccattttttaactggattgtttgtccttttattgttgagttttaagagttccttaaggccgggtgcggtggctcacacctgtaatcccagcactttgggaggctgaggttggtggatcacctgagatcaggagttcaagaccagcctggccaacatggcaaaactccatctctactaaaaatataaacattagctggacgtggtggcacacacctgtaatcccggctacgcgggaggctgaggcaggagaatcgcttgaacccaggaggtggaggttgagtgagacgagattgcatgccactgcactcagcctggacatcagggccagactctgcctcaaaaaaaaaaaaaaaaaaaaaaaaaaattagctgggcatggtggtgtgcacctgtagtcccagctactcaggaggctgaggcagaagaatcacttgaacccaggaggtggaggttgcagtgagctaagatcatgctgctgcactcctgcctaggcgacagagcaagactccgcctcaaaaaaagaaaaaaaaaaaaagagttctttatatattctgtatactagacccttatcaggtataatttataaatattttctctcattctatgagttatcttttagctttcttattagtgtccttttggacacaaacgtttttaattttgatagagtctaggctgggtgcagtggctaatacctgtaatcctgtcactttggcaggccgagacaagaggatctcttgagcccaggagttcgagaccagtctgggcaacagagtgagacctcatctttacaaaaataaataaataagatttttgtttaaattgacagaatccaatccaaagtcttgtgtttctatctaagagatttttttttttttttgagacacagtcttgctctgtcacccaggctggagtgcagtggcacggtctcggctcactacaatctccgcctcccaggttcaagcgattctcttgcctcagcctcccaagtaagtgagattacaggtgcctgccaccattcctggctaatttttgtatttttagtagagacggggtttcatcatgttggccagactggtcccgaactcctggcctcaaacaaccactcgtctcgacctcccaaagtgccaggattacaggtgtgagccaccacacccagccatccatctaagagtcttatggcttgcattgttacatttagtctttaatccactttgagttaatttttatatatggcatgaggtagaggttcaacttcattcttttgcatgtggaaatccagttggtccaacacattattattattattattttcttgagacggagtctcattctgttgcccaggctggagtgtaatagtgcgatcttggctcactgtaactgctgcctcccaggttcaggcgattctcccacctctgcctccccagtagctgagactacagtcgtgtgccaccatgcctggctaatttttgtatttttagtagagacagggtttcaccatgtggaccgtgctggtctcaaactactgacttcaaatgatccacccaccttggccttccaaagtgctgggattacaggtgtgagccacagaacccggtcccaatgccattttttaaaaagactaatctttccccattgaatggttttggcgccctagtcaaaaaaaaaaaaaaaaaaaatcaactgaccacaaatgtataattttctttctggactttctattctattccattgatctatatctcaatccttacaccagtaccacactttcccatgagttttttttttttcctttttcttttttttttttttttttttgacagagtctcactctgttgcccaggctggagtgcagtggcacgatcttggcggctcactgcaacctccacctcctgggttcaagtgattctcctacctcagcctcccaagtagctaggattacaggcatgtgccaccaagcccgactaatttttgtatttctaatagagatggggtttcaccatggtggccaggctggtcttgaactcctgacctcaagtgatccactcacctcagtttctcaaagtgctgggattacaggcatgagccactgcgcctgaccaatttttgtatttttattagagacagtgtttcgtcatgttgggcaggctggtctcaaactcctgacctcaagtgatctgcctgcctcagcctcccaaagtgctgggattacaggcgtaagccaccacgctcagcctgttgttattgatggcttagaaaagttttcttttagcacaggaacatcatcaataaataatgttatatcaacttttaggactatggtcaaacctgggaaaattcttaacaagtctctttcattaaagctacaaaatcttaaagaattttccccagactggcttttgacatcaaaccttgtttttcctctactaaccacacactttgggtgccagatgccataggacacattcatattgctagacaacctctagctatgcacgtttatgtcacaatgccccatgagttagcacaacagacatagagtattcctagaaaccattcccatactgggatggctagtaataccttgactatacacaaagaggctatgaaccatgtaaacatatcctgctaaaatccaactaaatatctctccaagtcaatttccccatagccagaccccaaaagtgcccacagccattccaatgccacccaacataaggaagagtgtaacaaaggggaagtcaggtaaaaagacggcaattttagctgactgtggtttagataacttacatttgcaaattcttcaaagatatgtgaccacatactggcaatgttctgtttcttgatctggatgctagttatatatgtgtgttcagtttgtgaaaaatcttaaactacacacttataatatttatgaattttctcattcatatattatataccaataaaactttttaaaaattaaccaagtgaacacattgctagggtccctcccagaccctcagattgggtcttgaaaattaagcttcaggctgggcgtggtgagtcacacctgtaatcccagcactttgggaggctgaggtgagtggatcacttgaggtcaggagttccagaccggcctgaccaacatgggaaaaccctgtctctactaaaaatacaaaaattagccaagcctggtggtgcacatctgtaatcccagctacttgggaggctgaggcaggagaatcacttgaacccgggaggcggaggttgcagtaaattgagatcgcaccactgcactccagtctgggcgacagagcgagactctgactcaaaaaaaaaagaaaattaaggttcattagtttcaaagagataatagcaactggatatcataagatgtggtgtctaataccagctataccatgaattacccatgggacttggagaagacacatatgcctccctaagcaattttctcacctaaaatggggaagtttaagtcagactataaactctaagacttctttccagtagtcactcaagaaatacttcccaagtacccgttactgtttggcatcacattaggtaaatgaaacacacacacaatccctgccctgtgggtgctccccatctaatagggattaaaaaacaatgagcagcattaggtaaaaactaatcggaataaatatggattttagttaataaaagtgtaccaatattggttcattaattataacaaatataccatactaatgtaagattagtttagttaatagggaaaactggttatggaaatacaggaattctatactatcttcagatttacagatctttagatttacagatttttcttatctttagacttacaggtttttctatacatctaaaagtattctaaaatcaaaagtttatttttaaaaagacagtaaacaggtaaataaatgaatattaaaagaaattgtgttcagttctcagaagttaacaggatattatggaggtagcataatgagagtagagactactttagacagactacttaggaactctttgagataatacaactgacacagaaaaataagaagaaacaagagaaagaaaattccttcaaaagaaagaatatatacaaagactctgaggtggaagagattggccttttcaagaaattaaaagaaaatccacgtgactaaagcataatgagcaaaggaaagcccagtcaacaggggcagattatataaggtcttggataaatagtgtctatttcattcaaagtataatggaaagacactggagggttaaagcaaggaagtaaaatcatccaatttacttttttcttttttaattcatgaagctatactgtggagaatggattatagacgggttaaagaaaaacaatgaggccgggcacagtggctcacacctataatcccagcactttgggaggccaaggcaggcagatcacgaggtcaggagaccaagaccatcctggccaacatggtgaaaccccgtctgtactaaaaatacaaaaattagctgggcatggtggcgggtgcctgtgatcccagctactcagaaggctgaggcaggagaatcatctgaaccagggagtcggagattgcagtaagccgagatcatgccacagcactccagcttggcaacagagtgagactccatctcaaaaaaaaaaaaagaaaaaagaaaaaaaagaaaaacaatgcagaccctatagggaagcactaacatcattttattcttaaccctgaattataatattttttcaatacaaaaatcattccaaaaaaaaacatttcagagaattaaagaattaaattcacatattcatataaattattttattcagatagtatctgcttttttaccaatctgcttctctatgacctttataatcctttatcaaaataatttatggattttatactttaataagctatcataactcttctagaagctgctgaaaatttttatgccatttgttaagtgctctgtaataaaattcctggaaattcaaaggtagaacataaaataaattataaaagctgaaaatttttatctattagattaatatatcaaagaataaatagtccaaccccccaaaaaaaacaaaaagtagcagcacctgctgccactgccaccacctgtgacaattttttaaatggctgcaaattctttgaaacttcttctatcaagatatgggagttcatgttccctctccttgaatctagaatagcctgtaactaacttgttttgtaaccaatagaatgcaggtaggacctcctaggctaagtcagaaaaggagatgtaactttcactttgttccttggacaattcctgctggtgccctgagtcagtcatgttagcagtgtagctgccgtaaagctgccataaaccagcccatgtagacagaccacatggaggctctgacatgacctgaagtgagagatatgcccagccaccccccagcaattccagttccagccaccatctgaataaacacacaatagactctgggccaaaatgacccaattaagccccttgccaaatccctgacccacagaaaccatgagatgataaaactattagtctcactccagctggaatgcaatggcacaatctcggctcactgcaacctccacctcctggattcaagcaattctcctgcctcagcctcccgagtagctggaattacaggtgcatgccgccatgcctgcctaattttttgtattttagtagaaacagggtttcaccatgttgcacaggctggtctcaaactcctgagctcaggcaatctgcccgactcagcctcccgaagtgctgggattacaggcgtgagccatcacgcccggccctagggtcattttttatgcagcaattctaataagccctttctagcaaatatgtgataattcatgtgaataattgggaggaggagaagaatttgtttggctagcaatgcaggtcgattttccagcttccaagtatctaagggatctggaaaagctatgtaatattactgtaactcacagaaagcaaggtacatcctccctaaagtcagcataattggccttataatctctacagattctttacctgcatcatgattcttctatagcaaaagagaatggataaatatacttatcaggccactgagtagtcaactgagagccttgcactatataatcctactaaatgtagtagttatttattatggcctaaattaatccctggcctctcctgaaacaaaaatgagtgagccatttattgcagaagcatcaaaactgccaaacaaagcaaaaattaagtttactcttttgaaccaagaattatcacacattaccactaagaaggacagacagatcttttaaattatgtttatcagccatccctttttaaaactttcattcatttaattaacacatatctattaagcactgtgtgtaggcaaatattagtatgaatgagtctatagctataaagaagttcacagtgctatggagaaaacatcaaccaaccaattttaagttgaattttatttatttatttatttattttttgagacagggtcttcctctgtcgccccagttgcagtgcagtggcacactcatggctcactgcagcttcgacctcccaggctcaagagatcctcccacctcagcctccctggtggctgggactacaggcatgcaccaccacgcctggctaatttttttgtatgttttgtagagacggagtttcaccctgttatccaggcttaagttgaattttaccctttattttttactttgagataggttctcgctctatcacctgggctggagtacagtggcgccatcacggttcactgcagcctcaacttcctgggctccagtgaccctcccatctcagcttcccaagtagctgggatcacaggcacgtcaccatacccagctaatttttgtttttttggtagagtcggagttttgccatgttgtccaggctggtctcgaactcctgagttcaagccacccacctgcgctggcctcccaaagtgctgagattacaggcatgagccactgcacccggcctaaattgaattttaaatcaatatattaatacaatgagaattatgctaaagtagtacaggagaataaataagggtgtgctagatgttttgttttctatttaatcctccagatctattctccatcctttaccctgtgccctaggaggctgccgtcatgtactacataaactgggctctttgttctctggctttaaatcgggttcaataaatgagaagcaacaaccagggtctctctggactcccacaactactctctccctttgcccttgctgggccaaatatggtgcaacttcctatcattgctagtccctaggtgctgcactattccttgctggattcccgtaacccttcccataccattgtaaatacctgcttcattacactctttgacctaattaagagtgttacttgtttcctatcaggatactaatagagagggacacctaactcagtctggggaagcctgggaagaattctcagaggagatgatgcttcagctacgttttttgtttgtttgttttttgagactgagtctcaatctgtggcccaggctggagtgcagtggtgtgatctcggctcactgcagcctctgcctcctgggttcaggcgattctcctgcctcagcctcctaagtagctggattataggtgcgcgccaccaagcctggctaatttttatatttttagtggagatggggtttcaccatatcgcccaggctggtctcaaactcctggagtgcagtggcacaatcttggctcactgcaacctctgcctgctgggctcaaaccatcctcccacctcagcctcccaagtagttgggactacaggtacgcaccacacaccaggctaatttttgcagtttttgtagagacggagtttcaccatgttgctcaggcaatccacctgcctcagccttcaaagcgctgggatttcaggcataagccaccgcgcccagcctcagctatgtcttaaaactggagcaccaagcttggtggctcatgcctgtactcccaacaatttaggaggttaaggcaggaagatctaattgagctcaggagtttgagaccagccttggcaacacatcagaacctcatctctactaaaaatagaaaaaaaaaaaaaaaattagccaagtatggtggcacatacctatagtcccaactactcaggaggctgaggcaggaggaatgcttgagcctgggtggtccaggctgcagtaagccatgatcaaaccactgcactccagcctaggtgacaagagcaagactctgtctcaaaaaaaaaaagaaaaaaaaaaaaatgctgagtagccaggcatggtggctcacgcctgtaatcacagcactttgggaggctgagacgggcggatcacctaagatcaggagtttgagaccagcctggccaacatggcgaaactccaactctaccaaaaagacaaaaattagctgggcatggtggcgtgcctgtgatcccagctacttgggaagctgtctcatggtgaaaccctgtctctactaaaaatatacatatacacaaaaattagccaggcatggtggcaggcgcctgtaattccagctactcaagaggctgaggcaggagccgcttcaacccagaaggcagaggttgcagtgagccgagatcacaccactgcacttcagcctggataacaagagcaagactgtctcaaaaaaaaaaaacaaaacaaagtgctgagtagattcgacaggaagactaggtggggaaggaggaagatgggtaacagcatcatctaaggcaacagcactgtcaaaaacttggagatacaagagattatgaaatttaagaaaagacaaggagttcagagtggtagaacacagtggtatgatgggaaggctagggccaaatgataaagagttttgagatgctgatatatttaataaatctgttttctataataaataaatttgaagaaaaagaaaattcagaggaagaaaagagaaagctatagtttaaacgataattaagagacataccaacccaatacaatgtgtagacctcttccggattctgattaaacaaaccacttactcaaaaagggagaggggtatcaggtacagtggtgtacagctgtagtcccagcttctctggaggttgaggcaggaggataggttgagcccatgagtttaaggctgcagtgtgttatgttcacacctgtgaacactagtacacatcagcctgggcaacacagtgagaacttgtccctaaaaaaataattaagaaaaatagaaaagtggggaggaagacaaggaagagaataattggacatgcatgtctcctttttgtttgtttttaaattcaagacagggtatcgctatgttgccaggctggtctcaaacgcctaggcttaacaaccctcctgcctcagccttatgagtagctgggattacagacatatgccaccacacccaggtggacatgcatctcttaatgagatggatggggttttcttactttcaattacttcatgtgtctattaatgactattacttattgctggaatgagggtacaacataaattctaatcccatttttcattttatacatataaatgctaagaaaacctattcacataaataagtaggtaatgaaagaagttttgttacagcaatgccattaaattctttgagttagatgccaaaaaaaattaccaagatctataattttaaaaaactttctgggaaatggcatttgacttcactatttcttataattttttttttttttgagatggagtcccgctctgttgcctaggctggagtgcagtggtgccatctcagctcactgcaacctccatctccaggttcaagcaattctcatgtctcagcctcccgagtagctgggattataggcgcacaccaccatgcccaactaatttttgtatttttggtagagacagagtttcaccacattggccaggctggtattgaactcctgacctcaagtgatctgcccgcctcagcctcccaaagtgctgggattataggcatgagccactggaatttttctttttttttttctttctttttttttttttttaaattgagacaaggtctggctctatcgcccaggctggagtgcagtggcaccatctcggctcactgcaacctctgcctgctgggctcgagccatcctcccacctcagcctcccaagtagttgggactagaggtatgcaccacacaccaggctaatttttgtagtttttgtagagatggagtttcaccatgttgcccaggctggtctcgaattcatgagctcaagcgatccatcccttcagcctcccaaagtgctgggattacaggcatgagccaccactcctggccctataaaaattatttttaatgaccagctaaaacttgatcaagtccttcaattttgttgaaaactacagagagaaatatgcctgacttatgaaaagatgctacccagtcattgatatcactgccttctcaccaacattctgatttgtctctctggtggtgtggaaggcctctcaccacaatgtactatttgggatgtctggctaatgtgcctttctttgtaaagtggaaggtagaaaatatgaaagatcaatcgtagaatctagaaagcccccttagaaatacctatgggctttcattattttatttcacccttactgcatacaccattaactctagcactgactgtggttatttcatccatcaagtcttatctgtttggttacctgcaagttccctgaaagcaagataaaggtcttaacctcttcttaaaatcctagagcctacatctcagtgttaggtgcatgtaagactcccagcaaatgtttactgaatgaatatgtaaatatgagcatatttcatcattattcttagtcttcttccttgctagaaaaaatacaattaggggttaactaagctggaaatcagaagaaactgaaaaaaaaagaaaaaaaaatcagaagaaactgggaaagagaaaactaaaatatatgaagcttcaaattttatcacaatgaacttttggtacatctatcctcatttctaaagaactggaatagaggccgggtacggtggttcacacccgtaatcccagcactctgggaggctgaagcgggcggacctgaggtcaggagcttgagaccagcctggccaacatggtgaaaccctgtctctactaaaaatacaacaattagccaagcatggtggtggcaggcacctgtaatcccagttactccggaggctgatgaaggcaaatcgcttgaacccaggagggggaggttgcggtgagccgagatcatgccattgcacttcagcccgggtgacagagtaagactctgtctaaaaaaaaaaaaaaaaagatttagggaacaaatttcgtcagataaaaggtgctcatttcactttcactggttcagattacctacaaagacaccttggtagacacagtggctcatgtctgtaattccagctaccagggaggctgaggtgagaggactgcttgaaacccagagttcaagaccatcctgggcaacagtgagacccagtccttaaaaactttttttcttaattagccaggcacagtggtgagcaactattgtcctagctactcaggaggctgaagcaggaagactgcttgagcctaggagttccaggctgtaagtgagctacgatcatgccactgcactccagcctgggcaacacagtgagaccctatctcttaaaaaaaaaaaaaaaaaaaaaaaaaaaaaaaaaacaggatctcaatagtaattaaatgagacaataaatgagaatatcttaaaaccatagaactctaaaaaaaaatgttaaattatcttcctaacattgacagactacttacatgtgacttttcttagatgataatccagcaacagattttattccagtgaatgttagtgatcttcattttgttaagcagcaaaatttgcagtgtggtaaaacagttctatccatcaagtcaaatattaacaaatgaacacttcagtcctatatctttataacttaatgatgttgaaattactaaggtataaatgttagttaattcaataatgacatcacaaagagagatcttatttgtttcaactgaggtccctgagatcacgaaagcctgttttcaatttcatcattctttaattcacaaatggctcacacatgtaactccagcattctgggaggtcaagactggaggactgtttgaagccaggagtttgagaccagcctgggcaacataatgagactccatttctacaaaaaatttaaaaattacaccagcatggtgccacatacctatagtctcagctactcaggaggcagaggcaggaggattacttgagcccaggtggtcaaggctatagtgagccataagcctgagcgacagagtgagaccctgtttcaaacaaaaacaaaaacaaaaaacaaaacacacacacacacacaatttattgaagtactacatatgcagcactatgttagagatggtattttgaatctatcaaatgccgttttacttttccttatagttttttttccatccttctttctctacaaaattccccaagttcaactgtaaaaaatctctatcaaccttatttatggtattagattcatacaattctgaataatcttaccaaccaatcagtgttttcttcttcactggaggaagaaagttacatgtaaagcctgatgacacaaaaatcacaaaaataaaaacagaattactaatgtttgcaactctactatctactcctacaacatgtagcatttaaagagtttacataagaaagctcacactaaagtatgatttttcattacacattggagtcaaattttcagtttctaactcttcaacaccatttattccaagcacactcatttagactttgggtttcagttttacaggtttttacataccctgacatctatcagtgcagaaatacccccatctactggcaagaggtgacgctacaggctacttttgaaagcgccagcatgctacagaggaatttatcaagtcataaagagttcatccaaacagctccccaatctacaatccaactccaaaatcctgagccatcttctacttcttaccaaacattgggggatggaaggaacagagaagtatagttaatcggttaaatggctgccatattaagataaaaatggtttataaaaatatatttttaaatatttaaaatattgaggccgggtgcagtggctcatgcctgtaatcccagcactttgggaggctgcaacgggcgtatcacttaagataaggagtttgagaaacaacctggccaacatggtgaaaccctgtctctactaaaaatacaaaaaattagccaggcatggtggtgcgtgcctgtagtcccagctactgggaaggctgaggtgggagaactgcttaagccagggaggcagaagttgcagtgagctgagattgcaccactgcacaccagcctgagtgacagagcgagacaccatctcaaaaataaaatattgaaaatatttgattaaaatattgaaacataaatacctaattatatttcattatatgaatacttcatgatatgctgatacaagacatttatgccttttttttcttgcctagctaggatttcaatccaaaatgcttactttaaaagacatgtatcatttaaataaatatatattaatcattattaatgtcgtacctgctcttataaaatataatcggttttcaccaatttctttaaaacaaaatccgtggtcaaaaatgacaaagtacgtttacaaaaaactttacaccttgaacagtatctttcatgtacattattccatcatattgctaaaataaataagacttgccttttttttttttttttgagaccatgtctcactatgttgcccaggctggtctcgaactcctgagctcaagcaatcctccagtctcagcctcctagacagcagggattacaggcacacaccatcacacgggttttttgttttttgtttttttttttggtattttcacacctggttttaacgctgtcattttaagcatgcatttataactaaaggcacaagcacagagaaaataagtgatttgcttagatgcacaaagcttatacatggcataactaggatacgaactcacattttctgcctccaattctatactctccacaacattctgactacctctcataaaatgaccaggcacagtggctcatgcctgtaatcccagcactttgggaggccgaggtgggcggatcacttgaggtcaggagttcgtgaccagcctgaccaacatggtgaaacctcatgcctactaaaaatacaaaattagctgggtgtagtggcaggcacctgtaatcccagctactggggaggctgaggcaggagaattgcttgaacctgagaggctgaggttgcagtgagtggagatcgtgcctgggcaatacagtgagactgtgtctcaaaaaaacaaaattaccaagtatatcttacatagaaaatgagatctacattatggatttctgctttgtgacagtgcctaggaatgcacggtggttaaaaaaaaaaaaatctgctggctgggcgcggcggctcacgtctgtaatcccagcactttgggaggccgaggtaggctgatcacctgaggtcaggaattcaagaacagcctggccaacacagcaaaaccctgtctctactaaaaatacatggtggcgggtgcctgtaatcccagctacttgggagggtgaagcaggagaatcacttgaacccaggaggcggaggttgcagtgagctgagatcgcgccattgcactccagcctgggcgacatagcaaggctgtctcagaaatatatatatttttgtgtatatatatatgcttacattttaataaaattaagtttcttcctttcttttgccttggagaaaaaatatacacataaagctgggcgcggtggctcacgcctgtaatcccacactttgggaggctgaggcgggtggatcatttgatgtcaggagttcaagaccagcctggcaacatggtgaaaccctgtctctactaaaaatataaaaattacacgggcatggtggcgcgcgcctgtagtcccagctactccagaggccaaggcagaagaactgcttgaacccaggaggtggaggttgcagtgagccaagatcgtgccactgcattccagcctgggcgacagagcaagaccctacctcagaaaaaaaaaaaaagagaagaaaagaaaagaaaaaatatacacataaaataatgcaagcaaaaacaggccaggcgcagcaatggctcagacctgtaatcccagcactttggaaagccaaggcaggggatcacttgaggccaggagttcaagaccagcctgggtaacacagtgaggccccatgtctacaaaaaataaaaaaattagctgggcacggtgatggatgtttgtaacccagctattcagaaggctgaggcgggaggatcacttgagcccagttcaagatcgcagtgagctctgattgtgccactgcactgcagcctgggtgacagagaccctgtcacaaaaataataatacaagcaaaaacgataaatactcataatccaacccacacttaacacaccaatcacctcctttcttttctatggtcacattttagatatgtttattctttatatcccacctttttccaaaaacatgactgatagctggtaaacagacacttacgttaagtcatggttgttgcaatcctctttcatcacatcagtaagagatgaaaaagactaataattttaaaatgtaaggttcataatagaaattctgaaaggaaaactacagggcccaatctaggcttttcctaatttcttatatctgcatttatggcaccacgtaataaaaataatatctgtcacagatcaaaaatgataaatacttattggctgaacaaattaaacagccgctccaaagcactacaagatcctaaatcaaagactcaatttgtttgaaagctgctttattttaaagctatagtaatcaagacagcatagtgttaaaacaaataaacttaaagggtagaatcataaagaaaacacaggagagtccagaaatagaattctatgtatactgtcaactgatttgtttgtttgtttgttttgagacagaatctcgctctgtcgcccaggctggagtgcagtggcacaatctcagctcactgcaacctccacctcctgggttcaagtgattctcttgcctcagcctcccgagtagctgggatgacaggcacctgccacacacctggctaattttttatttttagtagagacggggttttgccatgttggccaggctggtctagaactcctgacctcatgtgagcctcctgcctcggcctcccaaagaataggcatgagcaaccgcacctggcctgtcaactgattttctaccaaggtgccaagacaattcaatggaggaaacaaaagtattttcaacaaatagggctacaaaaatagaatatccatatgaaaaaaaaatcatgacacttacttctcacagcatattaaaaaattaacttgaaaataagtttaaatgtatgagttaaaattataaataatgcagaagaaaacacagagaaaatctttagaactctgggttagaaaaagacttaggactcaaaaaacatgaaccacaaaagaaaaacactgataaacaggtttcatcagcattcaaaacttcttctctttgggacatcttttggggggcggtgggggagctacagtccgggagaaaatatttgcaaagtatatatctcataaaaggcttatatccagaatacataaagaattctcaaaactcaataagaaaacaatccaattttaaaacatgaacaaaagatttggatattcaccaaagattatatggacaataaataagtccattaaaatgtgcttaaaactgtaggttattaaggaagtaaaaattaaagtaccatgaaatatctgtacctaccaattagaatggctaaaatcaaagacagtatcaagtgctgactaggatgaggaactactgaaactcatacaatgctggtagaaatgcaaaatggtacaactttgaaaaaaaaaaaatttttttttttgagacagagtcacccacactagaatgcagtggtgtgagcacagcaccgcagccttaacttcccaggcccaatcaatcctccatcagcttctcaggtagctgatactacaggcacaggccacacccgaccaatttctgtattttttgtagagacggagttttgccatgttgcccaggctggtctcaaactcctgggctcaagcaatccgcccagcagatttttaaaaagttaaaatgcatactttctgtatgatgcaacaatcccactcatttacccaagggcaagaaaaacatgttcacaaagagccatgtactcaaatgtttattcgtaatggccaaaaactggaaacaacaaatgtctgcagatatttataaatggataaacaaattggtgtacaatgcagtattcctcaggaatgaaaaggaacaaagtactgatacccagcatgaatggatctcaaaagcattacgctaaaagaagcctcacccaaaagactgcagacagtatgattccatttactcaaaatcctagaaaaggcaaaattatagtgaccgaaaacagatcagtggttgacaagttctcggtattgaagaagacaactggctacaaagaggtaagagaaaatgttttgggaagaaactttttgggaagaaatgggaagaacattgcatgattgcaatcatccacgtggtaattcctccctaaaaatgaatcatcgaggtttatttaaaaatttaaactttatgtctgctaccaatttttgtacaaaaccaaaccaaactgccaaacttcagattatctgttgacactttttaatataatatcaaatgtggttttaaaaaaggtagccaatgccatcagaagctattctaaaacagagttggtctgaaactattcttgttcagaagactgctcgtatttaaaaaatttttaatgaaataaaatttctcactttgttcaactacttatatgttggagagaaatccgagagaaaagaaaaattttaagtgttaacattcaactgtaacaagtaccaaacactgacacctagaaaaccagccatcagctgggtgcggtggctcatgcctgtaatcccagcactttgggaggccgaggcaagcggatcacctgaggtcaggagtttgagaccagcctgaccaacatggagaaaccccatctctactaaaaatacagaattagccgggcgcggtggcacatgcctataatcccagctattcaggaggctgaggcaggagaatcgcttgaacccaggaggcagaggttgcagtgagccgagatggcgccatcgcactccagcctgggcaacaagagcaaaactcagtatcaaaaaataataataataaataaataaatatagagatgaggtctcactatgttgcccaggctggtctcgaactcctgggctcaagtgatcctcccatcttggcctcccaaagtgctgggataacaggcgtgagtcaccacacccagccaaaattcttctaatcaagcaaaatacatataactgcattcctaaatacaagcaataactaggattagaaaacacaacgtaaatcacacaaatataaattatctgaaattaaattcaaacacaggaagaaaattataaagctatcctgaacaatatgggccaaagcttaaataaatgtaaaaaacatatcatgttcctgggtgagaaaactaaataaacttagatacttctttttcccaaagtaaagcaattctaatgacaatcccaatgaaatgtcttttttttttttttttttttttttttggagacacagtttcactctgtcgcccaggctggagtgcagtggcatgatctcgcctgcaacctccacctcccaggttcaagcgattcttgtgactcagcctccccagtagctaggattacaagtatgtgccaccacactcaactaatttttgtattattagtagagacagggtttcaccatgttggccaggctggtctcaaactcctgaccttagatgatccaccatcctcagcctccccaaagtccaaggattacaaccgtgagccaccatgcccggccccaatgaaacttcttattaaacttaacaagtttaatatttatgtggaagaaaaaaataagactaccaaaacaaatgaaaagaaattgggaggccaaggtgggcagatcacttgaggtcaggagttcgagaccaatctgaccaacatggtgtaaacccatctccacccaaaaaaaatacaaaaaaaaattagctgggagtggtggcatgcacctgtaatcccagctactagggaggttgaggcaggagaatcacttgaacccaggggtcagaggctccagtgagccaagatcacgccactgtactctagcctgagtgacagagtgagactccgtctctttaaaaaactggcctagtgagaatactaaactaaattataaagctacaataaaaaaaacagtatggcactgaacaagagctatatctgactctataactaatataactgaaaagatactacatcactgtggaaaggaagaattggttaataaataatgacaagatggctaaatagcaattgcaggggaaatagtttattaaaccattttttaaaaacattaaatataatgtacttatttatcaaacttcttggagaataagttcttccaagtatagaataggaaaaacaaaacaaaagttggacagattttgactcctaagataacacatttctacatgtccaaacaatgaacaatattaaaagacaaataattcatcatggaaatgtttgtagcaaatatgacaacaggttaatatatttgtaagtctcaggtagatcaataagaaaaacactaaggctctaacataactaggacaaggccaaacaagtcaatgaaaataaatatcattagtaaacagacaggaaaatattctgcttcacgaatgtttaaatggcacatgccatgaaattagcaaaaaatgtaaaatgcaattagcttatacttataacagaatagtaaaaagggacatctttatttactgctgctctaaataggtccaactcttgtaagaagcagcctaaaggaaaaattactcatgaaaccttaaaaatatccacacacttgaactcagtaacactatttttatggaagcatcctaaaaaaaaagaatccttaaaaaaaaaatcaaagttacctacaccaagatgtttacagcaattatttgtaataaaaaatttggaaataaacattcaaacaaaaaaatctgaacgatggttgctgttgaatctgcttaaccagttatcctaaaaccagtcttcatggttcccattccagtccatcctccatactgctcccagattgtgtctaaacagcaaatatattaaagcttaaaatcctgcaatggttccccccaccttaaaaaaaatgaacatcttggcaaactacagtaaggtccaaactaggttggtccctgtctagagcctcacctcttgccactcatacccaatgcattagccataaagaacacatgcagaactattcggaagtatttatagctctccagcattcattaaataaaatgccaaaaaggtcttaatccatactcacacaaggatgctggcttcatggcacttaaagcataggaacaataaacgcctaccagtgggttaggtctggtactagaagagcttcttagagtcatagaggacagttcaactcaggtcagggaaagttctagggataacagtaatctttgagttgagccttaaaagatgggcaagtattgctaggggcgagggcattcataattatactgagtcatgaataaaacattaagttctactaagtatggtctatttgaaaagaggaggacatattacgtctttaagactctcaccaaaaaaggctcaaataggccaggcatggtggctcacacctgtaatcccagcactttggaaggctgaggcaggaggatctcctgagcacagaagttcaagaccagcctgggcaacctggagaaaccccatctgtactggaaaaaaaaaaaaaaggtaaaaaaatcagccagtcacagtggcatggacctgtagtcccagccagttgggaagccaaggtgggaaaatcacctgagccgggaggtcaaggctgcagtaagccgggattgctcactgcacgctgttgccactgcactccagtgtgggcaacagaatgagattctgcctcaaaaaaaaaaaaggctaaaataaaaatcttgtatgcctaagcatgacccttcatttatctttaaaactgagttatgttaaatgagatgttagtatgttgtgatagtaatagctcaaccaacaagaaaaaagtaaaagtgatgactaaaatacacagactttattacgaataccaaactacaaaaaggaccttggcatgttctactgcctgcctgaagagggtcagactagaagacagaatttaaaagaaaaggaaggagctcaactacactggcttcctcctcagaaaccaagaaaataaaacaaattggggacattcaaatcactaacacctctagtatataaagtcattatgggccgggtgccgtggctcatgcctgtaatcccagcacactggaaggctaaggcgggcggatcacctgaggtccagagtttgagaccagcctggccaacgtggcaaaacccgtctctactaaaaatacaaaaaaaaccagccaggcgtggtggtgggcgcctgtaatcccacctactcgggaggctgaggcaggagaatcacttgaacccgggaggtggaggttgcagtgggccgagatcaagcccttcaactccagtcaagagtgaaactccaactcaaaaaataaataaataaagtcattatgatgtataggcatacttaaaaacctgtgaaatagaattaagctacaatttttaaagccttgaatcgataaaatatgtagtgaaacaagattaagacgctagcatatctaaagggaaatttttaaagttaaacttccttacattatagacaaggttaacctccttattgccaagggctttgaaattaataacatgagaagcagcatacaaaaacattaaatgtataaaaaggtctgaaacaaatgttctggaggagtaatcttattctgcttctccatacctaagaatttaaaatattagaaattacactaaactgctttttccagcctttggttttcagaaacaataatggtataaaaaattatcccaaagtttttactgtaaagaatatttttctatccaaaccattgaaagaaaagcctgtatcagatataagtataatgatatagacattatacattttgtaatcaatgttatagaaacagtagttgaagttgatagtgttaccatacagcccatttcaatgatcatatgttaatgtgtcataaagaacagaagtagcttgatggatgaaatcagattctaacccccaactgcctgaggaatctaaaatttgggatcaaattattaaattagccccaccttcttagcattgacaaataccaaacagttcactgattgtggttttaagaataatatgtggaaaggtttaatatcaattgtgggcagagatctcatggcttaaatatttcctcttcttcagagagagtgtgtatgagtgtgtgagtgtgtgtgtgtgagtgtgtgcatcaccatgtaagaaatgtttatacctttcagcaaaggggcaattccacaataaagttattatcaagtaactaaagtttatacagcatcttgaaatcaaaggtactctataaatttaaaatactaatatggtattaacttaaagcaaagaacaataattttaaaacaccttatagcccaagtgtattgtaaaccaaatataaattcactgtgggatctgtctttttttaagtgattttttttcctctattaggcaacccagatctaaatgaactgttaaacacttagtctaaaggtatgccaaacatttcttaaggtcttcacaaagaatcaactttttttttttttttttttttaaacaaaatgaggcctaggttaaatattttatttggcttctcaagatggactgagaagttgggcaccagctccagaccaattcctggacgcacatcaaacacagccctgtcatttatccagtcagtcaaaacaatcttttccatctaaccctttaatgtttatgtcctaaaaagctgctaattgaatccagctcttgagatctatttgctaaaatctataccatctaatttataaatgatgaacaaaaatggaagaaaaaatatgttaactttcctggcaaaacagaagagactccactgtaaccaaagaaggaaggacaatgtttttaatatttgtcaaattttaagagaaaactattcagagacaaatagttgtaagaaactcagagtacctcaaactgtttttactattaagaggacacagggtatttaaaattcctcagaaaaacctgaaacaaaatcactataaatgtagttcaatattcccccttcccctaaaatataagcataatctttcctcttaataaactttaattataaattcttataatgtatcataggcagtacggaaaccacagataaacactttaagatctattaagtcatactaaaaacctcaactaaccttatctgcagaaaatcaaaaacccaattttttccctcattttctctacatagcccagaggagggtaaatggaaacagcctatttctgatgctttctgcacacctgggatcacatgttctttccacgatcactgactacagacagcaacagcaacagataaactctaaagcaacaaagatcccctataaaggtttccactgactcctcccaatgtaaggacactgaatgaggggggagggggtggaatacaagtatcctccaatccaggttttccattaagaatcactcagttaatgattccctgcaattttccctagggaaaggaaaactgccatgaaagtaatatattatttaaattgcagccaacatacattcaagctaaattctcaaataccaaattcactgcaagttttcatccagcaagttcagccagtggactgggatgtgacacacaggcatttaactacaaaattagtccaaataaatctcaaagtctagtgtgggcaaacataattacagtttatccgtacacgtgcacgcacacacaaatcctctacggaaaattatctttctcaccactcacccgaatacaaacgtggacaatttatcaggggtaaatggtgaaggtaggataacgccgtgattccaattcctttacaaaccaaataaaagttctcctaaaacgggggtggcatgtccatgtaagaataccaaaaatggcactgtaagcaaaacgtacctgtaatgttaaagatttcatgcacctggaatcataaacactttgtaagtgtagtcttctatctggcaacccctccggacattcttttccatttcgaaaaaggaatggggagggtggggagagtaacagaaagtttgctcgaaagtttgtatgagcacatacttagcaatgcaccccccccaaaaaagtgtgtttttaaagcaggtctggcgttagaagttagacacaagttctgcggcctaaaaggaacaaccccaaacatgccaccctacaatcagacacttccaaaacacagtgtacaatgagcccaagccgtcggatcagacaggcacaccggaaaagtcaacctgtctcctcacctcagagacatgagtttaaggtgtgtggcccgggcagcggtggccggcggcggggagtaaaggtttttcatgcgggcataactgggtgtgtgcaaggtaacaacccgggaacacacacgcacaccctcccgttaagcgctccatctttaaggagtgtttactgcgcgcagtcagcaaccggattcaataatcctcgccacgggagctcttcatccccttcacgatctcacctgggcggtagcccaggggctgttccccgagccccgggaggcagcgtctggctccttgaccaagactttccgacctgaaatccgcctgcgatgcgaaccggtgtattctcccctccacaaaacaccaccccccgccccgagtcatcctcggctttttaaacaatgtccaaaccagagcaagtggttttccaattactctccctgaactaggccttcccattcctccgacccccaactcatcattgatcgcgaccctggcccttcccaaggccacaggcaccccccgccagctcgcccaccccgcggctgcccagcccggcccgccgccccccctcacctgtcaggcgcagcttgacgggcccgttcctccggcctccggggttagacatgtccccggcggcgggggcggcgggggcggcgggcggcacgggggcgacggcgaggcgcggcggagtcaccacagcggccggggctggggcccgagcagccggcgcctcggccgccacggccggagggtcccggatgtgccgagagtcgtcgccatgagccgcggagggagcgggacgccgagctcccccctcctcccacttctccttcctcggcccgggccgcacaacaaagcggcagccgcggccgcccgcgccgcctccgcccgcgcccccgccgcctcctcgcggccgccgaggcctttccctcctctcgtctcggcgaggcccagtagccgacggggctggtcggctgaagcgggcggtgctcgggggcgccggagcagaactctgggctcggccgcttcctcctccacccgccctcttgtctgagggacccgggacctggggccgccgccgccactcgtcggctccggggggcggggaggagacgggaggcggggccggcggggcggggcggggccggggcggggccggcgggcgcgcgcagggtgccctggcgggcaccggcagtcagggagggtgtgagctgccgccgagggtcccacgcggaacgctgggagggagcaggcagggagcaaagcggcggcgggcgcggcagctctgtggcacctggaggggtttactgtccgggccacttaagggagaacttttgtccaagcagggccaactgcattttattagacgcccactgcgtgcagggcgctccgagaggctggggcgaggaaggttagaaccgagtccgctgcctgccgggaacttggcgtctttcgggcgagggaagagaaagcattcccacgccgatggttccagcaaaaccccaggaatgctctgctcctggtcttgtagttgacacctccatccgggactcacctggtggaggagatcaggttacctgccgactcccgctcttttcaggtgcagccaaggatggggagatgatacgtcttaaaggattaacaagataaaccttggagagtaatgtatgaagagttgttcatacgctactgtatttcgttatctcaggaggagaaagagaaaagtttttaaaaaatgtgtaccttatcctttgacattgtaactgtactgctagaaatttattttttatttttttgtttttagacagggtctccctctgtcgcccaggctggagtgcagtggtgcgaacacggctcactgcagtctcaacttccggggctcaggtgatcctcccacctgagcctctggagtagctgagaccacagtgtgcaccactacgccccactaatttttgtatttttagtagagacatgtttagtagagacgtttaggttttcccatgttgcccaggctggtcacgaactcctgacctcaagcgatcagcccgcctcggcctcccaaagtgctgggattacagacctgagccaccgcaccggccctattcttgacaaataatcgtacagaagatgttctttgctatattccattaataacaaaaggggaatgagggaatagcataatagtccaggaaccgcatggttttttatgcagccatgtaactatttttatgaagatcatataatatggaagaatgtatatgtaatgcaaagtttaaaaacagaatagaagttgtatgcatatacatgcgaaagtatctagcacaatgtaaactactaaggacaatagcgtgggggattttttatgtgattcgttagttttgctttaggctattataacattaatgcaattttaaatgttttggattaatatattttaatccttattccatgccagtcatttcttttaatacatcagtgaactcacttctccagatagttacctgcgagaacatttcatcagtttggatacagccctacaattaaaagtaatccaaaaaagtatatgaagttctagacatcacactaaaaataccacagataggccgggcacagtggctcacgcctgtaattccaacactttgggaggccgaggtgggcggatcatttgaggtcaggagtttgagaccagcctggccaacatggtgaaaccccgtctgtactaaaaaaaaatacaaaaaaattagccgggcctggtggcgcatgcctgtggtcccagcaattagggaggctgaggcaagagaatcgcttgaacacgggaggttgcagtgagccgagatcacgccactgcacttcagcctgggtgacagagcgagactccatatcaaaaataaatacataaataaataaaaattaaaataccagagatagtgccagcaattcattcaacaaatattaagtggccattttgtgcaaagcaatgaacaaggtcctttagaaatgcttccttgtactacaaatatatagaaatcaatgtgaacaatagctgctaccacaatttaagagggcagacagtggcaaaaaacttagcaaactaatgtacacatacacatttgccttatttttacagcacgctttgttcccaaccacccaactaacataatttgtagccttgtattaggtaatagaagttaggatttcagaacgtcatgggagacctgggggagactgcttgttttgaagttgaaagcagtaaattaaaaaatgtaagtgacagcatagaaaaatgtatatagggttaacgtgcagaggtttgtatttaggctttcttgtaaggttaaatcctgttgtttaaaacaaatattcagataagaataacactaaaaccattcaagggctgggcatggtgactcatgcctgtaatcctagcactttgggaggccgaggcagaggagtcacttgagcccaggagtttgaaaccagcctgggcaacatggcaaaaccccgtatctacaaaacattagccaggagtggtggcctgcacctataggcccagctactcaggaggctgagataggatcacctgagcctgtggaggtcaaggttgcagtgagccgtgatcacaccactgcattccagtgccactgcattccatcctgggcagcatactgagactatcacaaaaataaaaagaaaatcaatgtactggtaatgatttttttaagcaggtacatggatgttcattttattgttttccttgccatcttaaatattgacattgactgtaaacatttatttaaaagtaactaaatgtttaaaatgaagtaaaataaatgaaaacatagaacaggggcagagcgtggtggctaacacctgtaatccccacacttcgggagaccaaggtgggaggatcactggagcccaggaggttgaggctgcagtgagccatgattatgccattgcactccagcctgggcaacagagtaagaccctacctcaaaaaacaaatgcactcaaaaacagaatactcataataggaaagtcattttgaaggcctctcttaagtgagtggcctcatctagtccaggctcagatttcagagacgattgggttagaaagtttaaaaaaacaaaaaagtttatgtgtttctcttcccttggggatatgtttatgtccccaaagggggatatatatacattataatgacaacatgtagggaattaccaaattaatagccggaacttgggaaagataagacggaaaattaagggatgggaatcttaggtaaaatcaattatatacattcaggtgtaaaagtctttgaggaaaggaaaatagcattggacatgaaaacagaaccattctttttttttttttagacggagtctcactctgttgcccaggctggagtgcagtggtgcaatctcggctcactgcaacctccacctcctgggttcaagtgattctcctgccgcagcctcctgagtagctgggattacaggcacccaccaccacacctggctaatttttgtatttttttttttttttttagtagagacgggggtttccccatgctggtcaggctggtctcgaactcctgaccttgtgatccaccctcctcggcctcccaaagtgctgggattacaggcgtgagccactgtgcccagcaggaccattctttacatatcaaaatattactatgagattcattcagccaccatttttattttattttattttattttattttattttattttttgagttggagtctcactctgtcacccaggctggagtgcagtggtgcgaccttggctcattgcaacctctgccttccaagttcacgtgattctcctgcctcagcctccggagtagctgggattataggcacctgccaccacccccagctaatgtttgtatttttagtagaggtggggtttcaccatgttggccaggctggtctcaaactcttgacctcaggtgatccgcctgcctaggtgtcccaaagtgctaggataacaggcgtgagccaccgcgcccggccctattcttgaaaaataagtaatagtacagaagatgttctttgctaaattccattaataacaaaaaagaaatgagggaacagcataatgatccgtaaactgcatggtcttttggggttttgttgttgttgttgttgttgttgtttgttttttgagacggagtctccctctgtcgccaggctggagtgcagtggcgccatctcggctcactgcaacctccgcctcccaggttcaagcaattctcctacctcagcctccgagtagctgggactacaggcgcgcgccacaatgcccagctaattttttgtgtttttagtagagacagggtttcaccatgttggccaagatggtctcaatctcttgatttcatgatccgcccacctcggcctcccaaagtgctaggattacaggcgtgagcccctgcgcccggccaaccgcatggttttttatgcagccatttaaccgacgatttttatgaggatcatataatatggtagaatttatatgtaatgcaaagtttaaaaacagaagaaaagttgtaagcatgtacatgcaaaagtatctagcacaatgtaaactactaaggaaaataacgtgagagttttttatgtgatttattagttttgctttaggttgttataacattaatgcaattttacatgttttggattaatatactttaatccttattccatgccagtcactgcttttaatgcatcagtgaagttgcttctcaggatagttacctccaagagcatttcatcagtctggatacgaccttacaattaaagtgatccaaaaaatatatgaagttcttgacatcgtactaaaaataccagagataggccaggcacagtggctcatgcctgtaattccagcacttttgggaggctgaggcgggcggatcatttgaggtcaggagttcgagaccagcctgaccaacatggtgaaactacgtctgtactaaaaaaaaaaaaaaaaaaatacaaaaaaattagccaggcgtggtggcgcatgcatgtatccccagctacttgggaggctgaggcaggagaatctcttgaacctaggaggtggaggttgagtgagccgagatggtgccactgcactccagcctggttgacagagtgagactccatatcaaaaataaatacataaataaataaaaattaaaacaccagagatagtgccagcaattcattcaacaaatattaagtggctattttgtgcaaagcaatgaacaaggtcctttagaaatgcttccttgtactacaaatatatatgacgtgaacaatatcaatatcaatgtaatatatcaatgtgaacaatagctgctaccacaatttaagaggccagacagtggcaaaaaacttagcaaactgatgtacacattcacatttaccttatttttatggcacacgctttgttcccaaccacccgactaacataatttgtagccttgtattaggtaatagaagttaggatttcagaacgtgatgggagacctgggggaggctgctgcttcttttttttttcctctctctttttttttttttcagacagagtcttgctctgttgcccaggctggagcgcagtggcgaaatcttggctcactgtaagctccaccttccgggttcaagcaattccctgcctcagcctcctgagtagctgggattacaggcgcccaccaccgtgcccaaataatttttgtatttttagtagagatcaggtttcaccatctcggccaggctggtcttgaactccagaccttgtgatccatccgccttggcctcccaaagtgctaggattacaggagtgagtcactgcgcccagccagaggctgcttgtttggaagtttaaagcagtacattcaaatatgtaagtgacagcatagaaaaatgtatatagggttaacgtgcagaggtttatatttaggctttcctgtgagtttaaatcctgttgtttaaaacaaatattcagataagaataacactttaaaaccattcaagggctgggcatggtgactcatgcctgtaatcctagcactttgggaggccgaggcagaggaatcacttgagcccaggagtttgaaaccagcctgagcaacatggcaaaaccccctatctacaaaaaattagccaggagtggtggcatgcacctatagacccagctactcggaaagctgagatagaaggatcacctgagtccacagaggtcaaggttgcagtgatccgagatcatgccactgcattccagtgccactgcattccatcctaggcagcagactgagactctgtctcgaaaacaaaaaaaaaagaaagaaggccgggtgcagtggctcacacctgtaatcccagcactttataatgctaactgtaatattttggcagtttttttttttatcaaattggggaaattctctccatatacctattttatctcaattttattatgagttggtgttgaattttgtcaaatactttttttctgaaattaattgacattctttttttttctttttagccttttagtatggtagactacattgattagttttcaaatatcaatgagctatgcatccttggaataaaccccactttgtcatgttgtgtaattcttatatattgattaattatatttgctaatattttgttaaggattttgcatctttatttatgatgtgtattggttggcagttttctccttttttgtgtgtgctttctttggttttggtgtcagagtaaatactaacttcttagaatgattgagcgatggtgttctcttctattttctgaaagagtttaggcagaattggtgttaataatataataatttttttttttttagatggagtcttgctctgtcgcccaggctagagtgcagtggcgtgatctcggctcactgaaacctccgcctcccaggttcaagcaattctcctgccttagcctcccaagtagctgggattacaggcacatgccagcatgcccagctaatttttatattttcagtagagacggggtttaaccatgttggccaggatggtctccatctcttgaccttgtgatccgcccacctttgcctcccaaagttctggaattacaggcatgagccaccgcgcccagcagtgttaattatttttatttatttatttatctattttttatttttttgagatggagtcttgctctatctccaggctggagtgcagtggcgcgatctcaggtcactgcaacctccgcctccaaggttcaagtgattcccctgcctcagcctcccaagtagctgggattacaggcacacgccaccacgcccagctaattttttgtattttagtagagacggggtttcaccatgttagccaagatggtttcgatctcctgacatgatccgcccacctcggcctcccaaagtgctgggattacaggtgtgagccactgcacccggctggtgttaattattttttaactggtagaattctctagtaaaattatctgggtctggagacttcttgtttgtgaattttttaattacaaatttaattttcttaatagtcatagggctgttcttatccattacatattggatgaattgtggtaggttattttcatttttttgaggaattggtccatttcatctaagttgttgaatttatgtagaattagttttagtatttcctaatcatctctttaatgtctgtagaatatatatcccccatttcttcttcttcttctttttttttttttttttttttttttgagacgatgtctcactctgtcgcccaggctggagtacagtggcataatctcagctcactgcaacctctgcctcccaggttcaagcgattctcctgcctcagcctcctgagtagctggggattactggtgcccgccaccatgcccggctaattttcatatttttagtagagacagggtttcactatgttggctaggctggtctcaaactcctaacctcaagtgatctacccgcctcagcctcccaaagtgctgggattacacgcgtaagccaccgcaccagcccatttcattttattttgtaacattagcaatttgtgtctttttttctccctgtgagaggcttgccaattattttatccttttaaaaaatcaaatttttgtattgattttatgaattaggttctatgttcagtttatttgatatattcacttgtctttactatattcttttttctttttgatttttttcttctttttctaggttcttgaagcaggagcttagattatttattatttattattagattatttatttctaatatataccttaattgctataaatttccctctcagctccccttcagccatgtcccacaaattctgtatttttgctcttctttgaaacttcctccttgaccactgggttatttagaagtgtgttgtttaatttccaagtgttttgatattttcctatctttctgttactgatttctagtttgattccattgtgaccagacaacagagtctgcatgatttcaaatattaagtggctattttgtgcaaagcaatgaacaaggtcccttagaagtgcttccttgtactataaatatatatgtgagtgaggggtacagcctccgttagaagctcccagcttccttctggggcaatgggacgcacctctctcctgcctcctgggcactcacgcgctctctggctcgctctctctctctctctctctctgtctctttctccctttgctccctttctctttcccccatgcccatacgatgtgaacaatatcaatatcaatgtaatatatcaatgtgaacaatagctgctaccacaatttaagagggcagacagtggcaaaaaacttagcaaatgtacacattcacatttgccttatttttatggcacatgctttgttcccaaccacccaactaacataatttgtagccttgtattaggtaatagaagttaggatttcagaacgtcatgggagacctgggggagactgcttgttttgaagttgaaagcagtacattcaaatatgtaagtgacagcatagaaaaatgtatatagggttaacgtgcagaggtctgtatttaggttttcctgtaagtttaaatcctgttgtttaaaacaaatattcggataagaataacactttaaaaccattcaagggctgggcatggtgactcatgcctgtaatcctagcactttgggaggccgaggcagaggaatcacttgagcccaggagtttgaaaccagcctgagcaacatggcaaaaccccatatctacaaaaaattagccaggagtggtggcatgcacctataggcccaactactcaggaggctgaaataggaggatcacctgagtccacggaggtcaaggttgcagtgagccgtgatcacactactgcattccagtgccactgcattccattctaggcagcagactgagactctgcctcaaaaacaaaaaaaaaaaaagaaagaaggccgggtgcagtgactcacacctgtaatcccagcactttgggaggccgaggcaggcagatcacttgaggtcaggagttcaagaccagcctggccaacatggggaaaccccatcgctactaaaaatacaaaaattatccgggcatggtggcaggtgcctgtgcctgtaatcccagctattcaggaggttgaggcaggagaatcacttgaacccaggatgcggaggttgcaatgagccaagatcatgccactgcactccagcctgggccacagaacaagactccatctcaaaaaaaaaaaaaaaaaaaaaaactactggtaatgatttttttttaaagcaggtacatggatgttcatcttgttttccttgccatgttaaatattatttgacattgactgtagatttttttttaagtaactaaatgtttaaaatgaagtaaattaggccagatgcggtggttcatgcctgtaatcccagcactttgggaggccgaggctggcggatcacctgaggtcgggagtttgagaccagcctgaccaatatggagaaaccatgtctctactaaacatacaaaattagctgggcatggtggtgcatgcctgtaatcccagctactctcgaggctgaggcaggagaatcaattgaacccaggaggcagagattgcggtgaaccgagatcgagccattgcactccaacctgggcaacaagagtgaaactctgtctcaaaaataaataaataaataaataaaaataaaataaaataaaatgaagtaaaataaaagaaaaaataaaacagaataggggccaagcgtggtggctaacacctgtaatctcagcaatttggatggccaaggtgggaggatcatggagcccaggaggtcaaggctgcagtgagccattattgtgccactgcactgcagcctgggcaacaaagtgacaaaacacacgcgcgcacacacacacacacacacacacacacacacacacacacacacacagaatactactaataagaaagtaattttgcaggcctttcttaggtgaatggcctcaactagtccaggctcagatttcagagatgattgggttagacacctttaaaaaaagaaaagtgtatatgtttctcttcccttggggacatggttatgtccccaaagggggatgtatgtacattataatgacaacatgtagggaactaccaaattaatagctggaacttgggaaagataaagcagaaaattaacagatgggaatcttatataaaatcaattacatgcattcaggtgtaaaagtctttgagaaaaggaaaatagcattggacatgaaaacaggaccattctttacacatcaaaatattattatgagattcattcaatcaccgttttgttttgttttgagatagagtctctctgtgtcacccaggctaaagtgcagtggctcgatcttggctcactgcaaactccgcatcccgggttcaagagattctcctgcctcagcctcccaagtagctgagattacaggtgcctgccaccacccccagctaatttttgtattttttagtagagacagggtttctccacgttggccagactagtctcgaactcttgacctcaggtgatctgcccacctcggcctccccaagtcctgggattacaagcatgagcaccagcatttattaatttatatgttcgaggcactgtactaggccttgaagttactgattactgagatggaaaaattataataattaaaggacagtcttgtgaaagagaatttttttaagaaagaaggaagaaagggagggaaagagggagacagggagggaaaggaaaagaaaggaggaagggagggagacggactcattaacaacctggactaaatttcattaataatgctttttaaccaatggctcccaaacccaggtcatctgtggttgaaaaagcaggttcctagccccatcccagacctactgcatccaaattttctgtggtcaggctgagaagtatttataaaagctccagaggggactctgacaaacaaccaagtttgggaaccgctatcccagcggttctcaaacttcagcctgcatcagaatcaccaggagaacttgttaaacagattgctgggtcccagctccagagtttctcagagggacagtctagggtggggctctagaattgcgtatctaaggtcccaggtgatgctgctcatcagggaaccacactttaagaactgcactcctggccaggcgtggtggctcatgcctgtaatcccagcactttgggaggccgaggcgggcgaatcacttgaggtcaggagttcaagaccagcctggccaacagggtgaaaccctgtctctatttaaaaaaaatacaaaaattcaccaggcatggtggcgtgcgcctataatcccagctactccggaggctgaggcaggagaattgcttgaacctgggaggcagaggttgcagtgagctgagatcataccagtgcacctgcagcctgggggacaaagcaagactccatctcaaaaaaaaaaggaagatactaagatgctatgctgctgactttgaaggtgaaagaaagggacatgagtcaaagaatgtaggtggcctctatacactggaaaaggcaagaaacagattgtaccctagaacctccagaaggaaggcagccctgctgacaccttgatgttagcccagtgaggcccattttcaaacttctgacctccagaactgtaaaggaaataaatgtgtgttgttctaagccaacaacaacaacaacaaaatgaactgcactcttctaaattacagtattaaggaaagctaaactttcagcattaaatgcacccaattgctttatcacagcaactgtgctttatcacagcaacagttttagatatatttttgagaaaaaaaaatgggagagataacaattcttagggaattcaccctttactctcttcctaaaatggaaatctacttcgaaagtaaattgtgcatgcacatgcctttgatgggtataaaaattgcagaaaatcttttcaaatcatttttattcccttatgacttctaatttattttcaggagaattgttcatgttttatcaaatcattgttttaggtatctgtctcaaatatagtgacaccacctgttttataccaataaaattaatcctttcccataaatgatatttaatataactgtccagtgaaatgctataacagcaactcattcaatagcattttctaagaaaatgttttttgtttgtgtgagacagggtctcacgctgttgcccaggctggagtgcagtggcatgatcacgggtcactacagcctcaaccttccaggctcaagcaatcctacctcctcagtttcctgagtagctgagactacaggcatatggcaacatactccgctgatttttttttttttttttttttttgagacagggcctcactatgttgccaggctggtctcaaactcttgggctcaagcagtcctcctgccttggcctcccacagcgctgggattataggcgtgagctactgcacccagccgaccaaaagttttaaactttttcattaatgtattttactaatcacttaaaggtgtattctttatgatagcatccgagaccataagtgaaaatctacacatggttatcagaatatttcaaagcttttgtttaaaacatttttctgttttccagggctaatgtcaaaatttgatgtgactctgcaagaaaatgcttaccatctgtggttggtatttttcttctgctccagccattaatatatatttttacatacaaaagttgtttccagtaataaaaaatctgtctgaggtaaggttatattaatatttgtactcctgcaaagctatttttgtagtgtaaatttcaaatttaatacagcttatccaccatagaagaggctaacatcaagtgctcagcaatttataccactgcttaaaagttaactttctttcactttgaaaatatcactaatttggccaggtgcggtggcgtatgcctgtaatcccagcattttgggaggccgaggtgagtagattgcttgaggccaggagtttgagaccagcctggccaacatggtgaaaccccatctctactaaaaatacaaaaattagccaggtgtggtggcaggcacctgtaatcccagctactctggaggctgaggcaggagaatcgcttgaacctgggaggcggaggctgcagtgagccaagactgtaccactgcactccagcctggataacagagtgagacttcatcacacacacacacacacacacacacaaagaaagaaatgaaaatgaaaagaccttactgtagtctttttgtgtgtgtgtgtgtgacagtctcggtgtgtcacccaggctggagtgcaggggcgagatctcggctccctgcaacttccgattcccaggttcaagcaattctcctgcttcagcctcccaagtagctgggactacaggcgcccaccaccacacctggctaattttttgtgtttttagtagagacggggtttcactatgttggccaggctggtcttgaactcctgacctcatgatctgcccgcctcggcctcccaaagtgctgggattacaggtgtgagccactgtgactggcctgtagtcttaaagtggctttctcagctgccaactctaggacctctcaactcagctcctcgtgtctagttcaatctcccagtgtccccatctcatgttttaaggagagaaaatttcattggctttttggtcagccacacacgtttggctccgtcagtggaggccaagctcccttagtacaaacacagctacctgggcttatacctgctgtaaggcagtggttctcaaggtgggttctctgcaccagtagcattagaaatgtacattcatgggccccaccccaacctacagaatcagcatctccagggatggagcctgggacgctgtattagagctacagacgagggcagatttcctcaggaagagatgcgtgtagggactaccttcttaccaccctgagaaggcagaaggcaactggcatgggggagcccagatctgcagagacacaggtaggaaatgtgaccctagcttctgtgattgggtgattgattggatgatttcatcaccttgattttggacttctacccttcactgcatctggcccaggtcttttccagtagataaataaatggtgaactgaaggccaggcatggtggctcacgcctgtaatcccagcactttggcaggtgaggcaggaggaccagttgatgccacaagttcgagaccaatcagggcaacatcacaggaccctgtctcaaaaaaaaaaaaaaaaaaaaaaaaaggaaatgaattcatagaaagagactgacaaagcagacaaacagagagaagctaagaaacttctcaaccctcgaaagggagacaaagagagtgattgacagattccctgccagttctcctggctcaggtgtacttctcacactccatttccaagaggtcccccagtgaataaccaccctgtcccttacttaagcaagtttaagtgggcccctgttccttgcatttactttgtctccacttgaaaccccttttccttttcagatctgtcctaagctcatcctcagagatccttgattgtctgtcttgctcctgcccatgttttccccagaactggactctcacctggaacccagcccacggcttggatcccaccacccagctgccacgcttctacaatctagagcggcgtaatacatatggctagtgcgcacttgaaacctggctagtgatgggctgcaagtgtaaaatacacagtggatttcaaagactcagtatggagaaaaaagcaaaatatcttattaatattttttatattgatgacacgttaaaataatattttggatatacctacattgggttaaataaaatataatattggccaggcacagtggctcacacctgtaatcccagcactttgggaggcctagggtggatcacctgaggttcggagttcaagactagcctggccaacatggtgaaatcctgtctctactaaaaatacaaaaaattagccaggtgtggtggtggatgcctgtagtcccagctactcgggaggctgaagcatgagaatcacttggaccttagaggtggaggttgcagtgagtcgagatcttgccactgcactccagcctgggtgacagagtgcagagcaagactctgtctgaaaaaaaaaaaaaaaaaaaaaaaaaaatatatatatatatatatatatatatagtatatatacagtatatatagtatatatactgtatatatactatatatatagtatatatactgtacatatactatatatatagtatatatagtgtatatacactgtatatgtatacactgtatatatatacactgtatatgtatacactatatatactgtatatatagtgtatatatatatactatatgtagtaattgaagctcatttcatctagaaaatttgaaattacaaatatggctctcattgtatgtcttttggactgtggtgacctagaggtaatgactattcacgtatgtacctccagaatatttgacataagctggatttgccactggctagctctgcactccgcccaacatcggactttgcctacctcacccctcaggccttaccttacccacccagctctctaattaatttctatggcgaggtcagttcaacagcaactatctcaccctggtgagaatgaaacaatctagtgttaagattttctttcagcccctaccacacctacctggttttgccttacattgaccatcgttcctgtgcctaagtcttaaaactagacagagattgtacagcagattcatgtgtgcagtagagaggtgggctagatgacctctgttatgggttaaattgtgacctccaaaaagatatgtggaagtcctaatccctggtacctgtgaatgtgacattatttggaaatgggccctttggagatgtaatcaagttgagatgaggctttagagtgagtcctaattcaatatgactgcattctttttcgttgtttttttgacagagtctcaccccattgtccaggctggagtgcagtggtgcaatcttggctcattgcaacctccgcctcctgggttcaagcaattctcctgccacagcctcccaagtagctgggattacaggtgcccaccaccacacccagctaatttttgtatttttggtagagacagggtttcaccatgttggccaggctggtctcaaactcctggcctcaagtgatctgcctgccttggcctcccaaagtgttgggattacaggcgtgagccaccgtgcctggccctgtgtcgttttaagaagagaaacattccatgtgaagacagagacacacaggaggaatgccatgtaatgacagaggcagagattggagtgaagcagctgcaaactgaatattaaggattgccagccaccaccagaagccaggaagaggcaacctaagattctacccaaagtctcagagggagcgtggccctgctgacaccttgattttggacttctatccttcagaactgtattgttttgtgttttaaaccacccaatttgtggtactttgtctcaggagccctgggaaatgaatacttctaagtctcttccatactttatcacatacgatacagataacaaaacacattctgcaacaggttttcattttttgttgcatttataatgctgcacttttttaaaaatagaaaatcatgtaaatctagaccattttatgcacccattttaagtatacacactagtctgttatattgtgaattctgagataaaagagaatgtaatttgaagagattgcatattttccaaagccaatttggtgatttaagcatggaagtattacaattaaatgtttgaaaagttatctatgcatgttttgctgtaagacgatagcatgaagcaacacatcttttcaggatgaggtagcagctccagccccgggggaagggagccggggcatcactcgactgcaactactttggacgactgagcaacatgaacaggctcaaaaaaaaagtcatatccaatcatcctcaaaatacgaactgtagtagctacaacacaattctctaagggcgagatgggcggagaagtggaaatatttgtacgatgcagtctttatgggtaatgcagagaatatgggccagaatgagatcaacatgactcataagcctgtgggtcaatgtcaaaccattgcttaaaattcctcaatggctgctcattgccctcaggacccagtccagagagctttgtgtggcatttccagcattgccgggcccctgcccacctccagccttatttcctccttctctgccctgcctgtaccaaagaactcaagactctcatctttcaggttccttttgtctcatggagctcagtttctcctctcaccttcagtcagtaagtaggcacctgctttcccatctgtctggcctatccaaacaggaaagcatataatatgagtattttacatcgtgtaattgactacttgatcgattcataaattatattgtggtgtgaatgtgtctgataatatattacttagagttttgtcattttcgttaattttttttttttttttttttttgagacagagtgtcactgtgttgcccaggatggagtggagtggtgcaatcttggctcactgcaacctctgcctcctgggctcaagggattctcctgcctcagcctcccaagtagctgggattacaggtacctgccaccatgcctggctgatttttgtgtgtgttttttttttttagttgagtcagggtttcactatattggccaggctggtctcaaactcttgacctcaggtgatccacccacctcagcctcccaaagtgctgtgattacaggcatgagccaccgtgcctggcctcattcattttaattaatgatataattttaaatgggagaaccaccagagatcatctaccatgttcacctccctctggatgaagaaaattaggctattttttttttaacatcttaaaagacagtcagggccggagccgggcgtggtggtgggcaaccggaagtcccagctactcgggaggctgaggcacgagaatggcatgaacccgggaggcggagcttgcggtgagcagagatagtgccactgcactccaacctgggcgacaaagcaagactctgtctcattaaaaaaaaaaaaaaaaaaaaaaaaaaaaaaaaaaaaagacagggccaggtgcggtggctctcgcctgtaatcccagcattttggaaggccgaggcaggtggatcacctgaggtcaggagttcaagaccaccctggccaaaatggggaaaacccatctctactaaaaatacaaaaattagccaggcatggtgatgtatgcctgtaatcccagctactggggaggctgaggcaggagaattgcttaaacctgaaaggtggaggttgcagtgagccaagatcgtgccactgcactttggcctgggcaacagagtaacactccatctcaagaaaaaaaaaaaaaagccgggcgcggtggctcatgcctgtaatcccagcactttgggaggccgagatgggcagatcacgagatcaggagatcgagaccatcctggctaacacagtgaaaccccgtctctactaaaaataccaaaaaaaaaaaaaaaattagccaggcatggtggcgggcgcctgtagttccagctactcgggaggctgaggcaggagaatggcgtgaacccgggaggtggagcttgcagtgagccgagatcgtgccactgcattccagcctgggtgacacagcgagactccatctcaaaaaaacaaaaacaaaaacaaaaaaacagtcagggccgggcatggtggctcatgcctgtaatcccagcactttgggaagctgagacgtgtggtcaggagtttgagaccagcctggctgaaatggagaaaccccgtctctactaaaaatacaaaaattagctgggaatgttggtgggtgcctgtaatcccaactactctggaggctgaggcacgagaatcacttgcacctgggaggtgaaggttgcagtgagcagagatcgtgccactgcactccagcctgggtgacagagtgagactctgtctcaaaaaaaaaaaaaagaaaagaaaagacactcagaagcctcttagagtgtgtataattgtgataatcacagactctgacaacaaagtcaattattggaatacatcctcttcattagtagggtctttaaggtagcaccccccaccaaattccagataaaaacttcaggcctcccctgaggtaaggctggacttccccagggcttctatcatgggaggctcatcccaataagaccaatggcatggaggaagtaaagaaaagacaaagtgctctgtaagcaactgggtaccaagagaaactctaaaatccacagtggggaaagttgttctatctttccaaggcctgagtgaactaaggggcggtgagaggtcagaagtattccattaattaatatccttgcacatgtaaggaaacttcaggagttgagtaagaagcaaacttccccctgctgttcactaacggccgaatcaatgaatgtcaagatcattacaaagcaatgtcatttcatattttccaaatgacagaggagaatatttaattgcatccattatctgggaaagctgatactgttaactgtggagaaatttatgaagcaagaagggccctttacctacagaggtgcataaacacactcggactagaatttctagatttctaagtaattgtttttggtattagaccccccagtggccattcctttattaaaacttgtcattgtgtgtttaaaatcctatccactgagttggtttcaaccttactggaaaggaatttataaataaatatcaaagcacatggtaaggttacattcctaggaatctattctaaggaaatcatcagaggtctgcccaaagacactgatatggtttggctctgtgtcctcaactaaatctcgtcgcgaattgtaatccccacgtgtggagggagagaggtgattggatcatgggggctattttccccatgctgttctcatggtagtgagtgaattcgcatgagatctgatggttttataaatggcagtttttcctgcacttacactctctcccgccatcttgtgaagaaggtgcctgcttccccttccgccataactgtaactttcctgaggcctccacagccatgcagacctgtgagtcagttaaacttcctttgtttataaattacccactctcggatactatctttatagcagtgtgagaacagactaatacagacatatgcaaggatattcatccaatactgtttacaaggacaacaaagtgaaagcaatttaaatgcacaaaaggagattggttttaaaatatatggtatacttgtataaaaaactgttttttttttttgagacggagtttcgctcttgttgcccaggctggagtgcaatggcgtgatcttggctcactgcagcctccgcccccgccccccggggttcaagcgattctcctgcctcagcctcctgagtagctgggattataggtgcgtgccaaaacatccagctaatttttgtacatttagtagagatgggttttcaccatgttggccaaggtggtctcgaactcctgacttcaggtgatccacccacctcggcctcccaaatggctaggattacaggtgtgagccactgtgcccggcctgaaaaactattatgtaatcattgaaaataatgttcccaaagacattttttcttcatatatgtgtgtgtgtatattttatatatatatatatatatatagtttgtttgttttttaatagaaacaagatctcactccatcatccaggctggacaacactggcatggtcacaggtcactgtaacctcgaactcctgggctcacagaatccttctgcctcagcctcccaagtagctagggctcccagcatgtgccaccaggcccagctaattttattacttttaaaattttctttctcactatgttgcccaggctggtctcaaactcctggctgcaagtgatcctcccacctcaacctcccaaagtgctaggattacaggcatgagtcactgcacccggcctttcagatatttttatatgaaaaaaataagaagagaattcccctccctctgtctcttcctaggctccctagagaaaagaactaccacaaatttggcatgtactctttctgcgcaggttttcatacttcattcatttagtgacataagggaatgttaataatatacatatataaatttttaaaaagcagagaactaaaatatatgtgaggaatgatcccaaccccaattttaaaacaaatatacccatacatttattaattcaaaatgatgtttattaagaatctactaggagcactgggccccacggtgggatttccaggccctgccatgggagacgcatggggactgacaggttcccagatccatatcctggcagatgtctctggctcagtgtcccccattggctgcctgccaccttcaagggagctctgggaatggaagtcccctctcatgtaccaccaccctccccaggctggcctttgagaggtgaccccaggggaaccacgttgaggctgctttcaaatcctccagcgagagttccaccaaatggcctgggtggaccagatgagatgagactggaccatccccgaccgtgctcttcttgctgggggtggaggtggggtgggttgatggacagggtagacaggcagccccagcattataaaactgagatgcgactgggtgcgatggctcacgcctataatcccagtactttgggaggctgaggcgggcagatcacgaggtcaagagatcgagaccaggctggccaacatggtgaaaccctgtgtctactaaaaatacaaaaaccagctgggcgtggtggcgggcacctgtaatcccacctacttgtgaggccgaggcaggagaatcgcttgaacccaggaggcagaggttgcaatgagctgagattgcaccactgcgctccaacctggtgacagagcgagactctgtctcaaataaaaaacaaaaacaaaaaaaaactgagatgcattcctagggtgcctgggtatgggagtatcacataggatgcccttcttccagtcagcctgccttcagcttcctcaggcatgatcacaacttcccatcagagcctcttttttccttttccaccacagagaagtgaaacatgagagggagaaagagctcaataaatactgcttatcctcatttgtgtaatcatcagtgatctacatacagatgggtgactagacagggatgtgaaagaaaaaaaaaaaacgaagaatatactaggtgctgggcacagtggctcatgcccataatcccagcactttgggagaccaaggtgggtggatcacctgaggtcaggagtttgagaccagcctggccaacatggcaaaaccccatctctactaaaaatacaaaaaaattagccagatgtggtgggagacacctgtaatcccaggcgggaggctgaggcatgagaatcacttgaaaccaggaggtggaggttgcagtgagccaagattgcaccattgcactccagcctgtctggtggatggagcaagactccatctaaaaaaaaaaagaatatgctagttgctaagcgctgttcttagagcttgtaatttagtggaggaagacagataaccaacaaagagacaatacataaaatacgaaaggtaagaagagaattttccgctgttttctaggatgcattttcagtgctgaggttgtcaatcacagtgattctccagccttactgaaaatgttgaaacaggtactgtaggcaattaaaaacaaaaagaatatgttgagacaaaaattatacccctttcgcattggacatggacgaagaaggacggacactactgggtcattgtactcagtggcagacactgtttgagagtggcgtcaacacagaccaggaggggccaagagatgaagagagtgaaatctgatcttgattttcccatgggaggccctgtaggaagccattcataaagcctccacctagtttgggtcaggttttcagtcactagcccataagagttccaactaggctgggcacagcagctcatgcctataatcgcggtactttgggaggccgagacaggagaatcgcttgagcccaggagttcgagaccagcctgggtaacacagcgagaccccgcctctacaagaaatagaaaaaattaggggggcatggtagcacatgcttgtagtcccagctacttgggaggctgaggcaagaggatcccttgagcatgggaagttgaagctgcagtgagcctgatcacaccattgcactccagcctgggtgacagagcaagaccctgtctaaaaagagagagagagagagagagaagaactaattagtatatccagtgaagcagaatctctgggtggaagctgcaatctgcattgttaactaggtccctatgtgaatcttttttttttttttttgagacagagtcttgctttgtcacccaggctggagtgcaatggtacaatctcagctcactgcaaactccacctcctgggttcaagtgattctcctgcctcagcctcccaagtagctgggattacaggcacgtaccaccatgccctattaatttttgtatttttagtagagactgggtttcaccatgttgaccaggctggtctcgaactcctgacctcaagtgatctgcccaccttgggcttcccaaagtgctggattacagccatgagccactgtgcctggcctcccatgtgaatctgtattgaggaggtgaagaatttgctccagaacggggacaaccaaaaagcaaactttttctgtaaagggccagataataaatattttaggctttgtgtgccatagaggctctgtggcaactactcaactctggtactgtaatgtagatgcagccatagatgaatgggtgtggctgtgttctaataaaactttgtttacaaaagcaggcagtggactagatttggctcactggcatggtgcccacccctgctctagaactagagctataagcaaacagaaaactaccaaacctggaagggtcactaagattcagtaaagtatttttccaaaatctataaaatctgaaaccatttaatagttgaaagaaagaagccaataaaattataagaagcgctcatatttcttgagggcttactatgtgccagaggctatgccaagggatgtatcatttagaatgctttcatctcatagaacatctcatacaccaagtagttgtttttgtttttgtttgagacagagtcttgctctgtcacccaggctggagcgcagtggtacggtcacagctcactgcaagctccgcctcctgggtttacgccattctcctgcctcagcctcccaagtagctgggagtacaggcacccgccaccatgcctggctaattttttggcatttttagtaaagatggggtttcaccaggttggctaggctggtctcgaactcctgacctgaggcgatccaccagctttggcctcccacagtgctgggattacaggcatgagccacagcgcccggccccaagtagttttaagatagggttgattctgtggttggagtggcagtgctttcctgatttgttcaaggacacaggttctttccacctcatgcctcctccttccttggggcttgagctttgccctcaggtcactcccctcatgaccacaaaatggtgactacagttacaagccacatatccagagcaaatagtctttagaagaaacagatcatctcttcctctgtctttttaggatgaagagatcattcccagaagctcctccataccaggatgtttcctttctgttttttatttttttgagacagggtctcactctgtcacccaggctggagtgcagtggtgtaataatagctcactgcagccttgatctcctgggctcaagaggtcctcttgcctcagccttccaagtagctggaactacaggcatgtgccaccatgctcagccaatttttaaaaattgtttttagagacagggtttcactatgttgactaggctggtcttgaacttttgggctcaagcgatcctcccacctcggtttcccaaagtgctgggattacaggcatgaggaaccacacccgtcctcctttcacgtcttaatggtcagaatttgatcatgggctcactctcaattattagaaaggggaatggaatttccaagattagttgagtaatgaggaatcctctcctgatcttggctatgtagaggatatgggggatggaagggtgtgcctgtagaggctgtatgaatatctgaataaaaccagggctctggtaggaagaaaacatgggggccagaaatggatattgaataagcaaccaagcgatatgaccacaacacaagtaccatgaccaggtgatattagtttccgtgttttagagatgagaaaataagtcagagaggggaaagtgactaggtcaaggtcacaaagctactaaatgaaagagactagattcaggcccaggtctgtgactacagcgcccactccctcagccactgcactcaagtgctatggtgggaaagctgagttcaggaaagaagagaatagctgcaaagcttgcctcaaaatcaggtaaacttgagccacttgtaaaacctgtgatgtcgctgggcacagtggcttgcacctgtagtcctagctactcaagaggctgaggagggaggatcacatgagcccaggaatttgaggctgaagtgagctatgatcacaccactgcactccagcctgggcagcagggccaaactccatctctaaaaacaaataggccgggcacagtggctgacacctgtaatcccggcattttgcaggccaaggagcgaggatgggttgagctcagaagttagagaccagcctgagcaacatagtgagacctcgtctctattaaaacttagccaggtatagtgatctgtacctgtagtcccagctactcaggaggctgaggcaggaggattgcttgagccaaggaggtcaagtctgcagtgagctataatcaccactgcactccaaccttagtgacagagtgaaaccctgtctcaaaaaaataaaaataaaaacaaacaaacaaaaaccctgtgatgtcaccaagcctccctagcagggtgtaccgttcaggtttgttgtagaacaaacaaccccataatggagcaagtaaaagcacaataatttctttagctcacaattatatggctcagcaatttgggctgggcttctggtctcacctggactcactcatgcatctttggtcagctggggactggctggtctaaggtcacccctggtggactcctgggctggttccacatggtctgtcacccttcagcaggttaggctgtgcttgtgcatatggaggctgggcagggtgccaagagtgggagagaaatacctaaggcggccagacatggtggttcacgcctgtaatcccaacacattgggaggccgaggaggggcagatcatctgaggtcaggtgttcgagaccagcctggccaacatggtgaaaccccatctctactaaaaatacaaaaattagccagacatggtggtgcgggcctgtaatcccagctactcagaaggctgaggcagtagaatcgcttgaacctgggaggcggaggttgcagtgagctgagatcacgccactgcactccagcctgggcgacagagccagactccacctcaaaagtaaaaaaaaaagaaatgcctaagtcctcttgaggccttgtttggatctaggaaaaattacttttcaagtgaggactgaactaaaaaagaattttattttctcattctacagaaaggcagatgcaacagtggtaaatgccccattcccatgttctcagttcagggaggtgttcaataggttggtctgtttcacagccaacatcacctaggctcctcagggacaagtactcttaaccagagctagaagatggggctaaaaaacaggacatggattcagtacagagaggtggaaagcagcaccatggtcaatggattgagactgggatagggccacacaaggagagcatctgaaagccaaatatttaaaccctaagacaagattccacccagtctatttgtgcctgccccaaaaccaaaaaacacattccatatggcaatcaagagaccaaagcatatgtatacaaacatacacatatatatatgttttgttttgttttgagacggagtcttactctgtctcccaggctggagtgcagtagcacaatctctctgctcagtgcaacctccacctcctgggttcaagcgattctcatgcctcagcctcctgagtagctgggattacaggcccacaccaccacacccggctaatttttgtatttttagtagagacggggtttcgtcatgttgcccaggctggtctcaaactcttgacctcaggtgatctgcccgcctcagcctcccaaagtgctgagatcactggcgtgagccaccacttctggccagtgccatattttctactatcctggtaaagtaaatatttgtaccaaaccccaccaaacttgaaatgaatggaatgttcttaattttcaaggtgctatctttaaaggtcttctccagaatgacctgtgatatctttataggggccagggagtttcccctcgatatcagaatttctttacttacaagattataatctcataagattataatcttacaattacttacaagattctataattacttacaagatgataatcttacaagattccataattacttgcaagattataatcttataattacttacaagattctataattacttacaagattatcatcttgtaagtaaagaaattctgatattgaggggaaaccccctggcccctataaagatatcacaggtcattctggagaagatctttaaagatagcaccttgaaaattaagaacattccattcatttcaagtttggtggggtttaacacaaatatttactttaccaggatagtagaaaatgtggcgctggccgggcacagtggtgcactcctgtgatctctgcactttgggaggccgaggtgggcagatcacgaggtcaggagctcaagaccagcctggccaagatggtgaaacactgtctttactaaaaatacaaaaattagccgggcgtggtggtgggcacccgtaattccagctactcaggaggctgaggcagagacttgcttgaacccaggaggtggaggttgcagtaagctgagatcttggtcactgcattccagcctgggcgacagagtgagactctgtctcaaaacaaaaacaaaaacaaaaacaaaaacaaaaacactgtggtctaatctatatgtcttttttctgaattcatttgaactcattcactgctatcactaacagtttaaaggctgggcgtggtggctcatgcctgtaatcccagcactttgggaggccaaggcaacatggtgaaatcctatctctacgaaaaatatagaaaattagccgagtgtggtggtgcacacctgtggtcccagctactccaggaggtggaggtgggagatcactagagctcaggaagtgaagcctgcagtgagctgaaatcgcgccaccaggagtaagaccctatctcaaaaaatcaaaacaaaataaaacacagtttaaatactgtatgtaggcatttacattttggagttaatttcttttctttctttcttttttttttttttgattcagagttttgctcggtcgcctgggctgaagtatcgccattttggctcactgaaacctctgcctcccgggttcaagcaattctcctgcctcagcctcctgagtagctgcaattacaggcatgcaccaccatgccaggctaatttttgtatttttagtagatatggggttttatcatgttggccaggctggtctcgaactcctgacctcaggtgatccacccgcctcggcctcccaaagtgctgggattacaggcatgagccactgcgcctggcctttggagttaatttctaagaaaaggcagtgggcacaagtaagttgtagttcatcttatgaactcattcagaaatttacagccttttttaaaaaacagagagtgggttcttgctctattgccaaggctggggtgcaattgcataatcatagctcactgcagcctcgatctcctgggttcaagccatactccctgccccaggcttcctagtatctaggattacaggcatatgccaccatgctaatttatttatttatttatttttagaggagaagacagagggaatctagctgttacccaggctggtctctaattcctagcctcaaacgatcctccttcctcaacctcctgagtagctattatcggcatgagccattacccctggctgaaatttatagtctttatgtatgaattcatgaacagcatgaagcttggccaatagcatttctgaaagtggaacttggctcatgtgaatgctcataacaaaagagagattgccaaaacaagcaactttctctaaatagaggcgaaataatagtcttacagagtaaatcttcacaatgtaaaaacatagagtcagttcactaaatgttctctaaaacatgcttccaacatgctgttaagtggaaaaaaacttttatgatatagtattactgtataaattcatctcttaacagaaaaatatattatatatgcagatttcaacttttttttggagacagagtctcactctgtcgcccaagctagagtacagtggtgtgatctcggctccctgcaacctctgtctcctaggttcaagcaattctcctacctcagcttctcccaagtacctgggattataagcacccaccaccatgcccagctaatttttgtatttttagtagagatggcgtttcaccatatttgtcaggctggtctcctgacctcaggtgatccacctgcctcggcctcccaaagtgctgggattacaggcatgagccactgcacccaaccaatttaaacatcttaaaagaaacacatcaaaatgtaactagaggttgtttctacataatgggaccatggggatttctatttcttctttggcatatttgcattttctacttttttctataatgaacatctattgttaaaacaggtaagatactgaattttagcaagaaaaaatatgcaaatagaaaagaaataaaataaatataccaaatgtcaacagtggttaccagtagatgatggcatcatctgagattttcaactttctttttgtttgtttgtttgtttgtttgttttttgagacagtgtctcgctctgttgaccaggctggagtgcaatggcacaatcttggctcactgcaacctctgcctcctgggttcaagtgattctcctgcctcagcctcctctagctgggactacaggtgtgcaccaccatgccaggctaagttttgtatttttagtagagaaaggttttgccatgttggccaggttggtcttgaactcctggcctcaagtgatctgcctgccttggcctcccaaagtgctggaattacaggggtgagccaccttgcccggcaaattttcacatttagctttgatgttttttgaattttccacaaaaagtatatattagaattacattggtaatatcacatattatatcaccccatattagatgaatgggaagaggaagataagtgattacagagttagaagggtcacttcaataaactaagactaaaaacttctgcgttatcatcaactgctatagagtctttcttttaaagatgtctaattgtcggctgagtgtggtggctcacgcctgtaatcctagcactttgggaggctgaggtgggtggatcacgaggtcaggagttcaagaccagcctggccaagatggtgaaatcccgtctctactaaaaatacaaaaattagccgggtgtggtggcgggtgtggtggcgggcacctgtaatcccagctactcgggaggctgagacaggagaatcgcttgaacctgggaggtggatgttgcagtgagccgagatcgcaccactgcactccagtctgggcgacagagcaagactccatctcaaaaaacaaaacaaaaaccaaccaaacaaacaaaaaatatgtgtaattgtcaatagcaggatccctaaatgaagcagataaagacgtgatttgcaagtagcaatgacaccttcatactggtcctaatggtagaggggttccctaactcaacactgccccgttcctgtggtcagagcacctctctctgatgtcgtcaggaacaaccccaggccaaattcaagtgagaaaactggagcttaacagtggttcctagggttagttggatccaaagaatcaattgctaaagtagaagttgagggaggtgtgagtcaagaacagcctctgtggaaatgacttcaggcttttagttgacaatgggctcggtgtgagtcattctagggacatgggctcttggccaaagaattgcactgaggatcaaggacatgatggtgacctgctgccagcagcccagcagcctacgccataagcaatactttcagttctgggtgctttactgtaaatgggacaaggaggagaggaattaaagtgcttagggacttcgagtcatgtaccgcaagcaatgtttggagaagctgagaaagaaaactcagggggcggggcgcggtggctcacgcctgtaatcccagcactttgggaggctttggtgggcagattgcttgaggctgggagtttgagaccaccctggccaacatggcgaaaccccatctctactaaaaaatacaaaaattagccaggatcatggaggtgcacgcctgtaatcccagctactagggaggctgaggcacaagaatcgcttgaacctgggagccaagattgcgccattgcactcccgcctgggtgacagagcaagatgctgtctcaaaaaaaaaaaaaagaaaaagaaaaaagaaaaagaaaagaaaactcaggggacactaacagctagctgccttaacatacctgataagctatcaagttcaggtcaattaaatttgttccatgtggttctacaggaagtagccaggaccagtgtggtggggctgtaattggaattatactgagacagaccttgagataggagaacagatttttgagtagtttgaaatggcagaagatacattggtcttgaacctgctcctcaaagtgtggtgcagaattgcagcctggcttcagaggaagcccattagacaaggactaggtctcagcccccagctcagacctactgaatcagtgcctgcagtttaaaaagatgcccagggccaggcgtagtggctcacacctgtaatcccagcactttgggaggctgaggcaggcagatcacttgaggtctggagtttgagaccagcctggccaacatgatgaaaccctatctctactaaaaatacaaaaattagctggacatggtggcaggtacctgtaatcccagctactagggaagctggggcaggagaattgcttgaacccgggaaggcagaggttgcagtgtgctgaggtcgcatcattgcactccagcctggtcgacaagagcaagactcttgtcaaaaaaaaaaaaaaaattaaatttaaaaaagatactttagatcattttttgtgcctattctgctatgtagataaaaaaaatttttgagacatgatctactgtgtcatccaggctggagtgcagtgatgccatctcggctcactgcaacctctgccttccaggttcaagtgattctcctacctcagcctcccgagtagctgggattacaggggcccacgaccacacctgtctagtttttgtatttttagtagagacagggtttcaccatgttggccaggctggtcttgaattcctgacctcaagtgatatacctgcctcagcctcccaaagtgctgggattacagatgtgagtcaccacgcctggcctcatgtacaagttttcatacggaagaactcttcatcttttacatttctgaaaatatattaatgtgatgcaactctttgaaaaagtcacacataaaatgtctatttttaaaaaaatttttaatttttattttttttgagatggagtcttgctctgtcgctaggctggagtgcaatggtgccatcttggctcactgcaacctccacctcctgagttcaagcaattctcctgcctcagcctcccaagtagctgggactacaggcacgtgccaccacacccagctaatttttcaccatgttggccaggatggtctccatctcttgacctcgtgttccgcccacctcagccttccaaagtgctgggattacaggcatgagccaccacacccagcctaaaatgtctatatttttaagttccattatcccatttctcagaatctgactcaaataaataacatacacgtagaaggtactaggtaggaagtttctaagcatgatattatttaagcatcactgttttttccttcttctccagtaaaaggtacaaaaataagggcccaccttcttaataactgaaatatgactcacgggacattttccttttatcccaagaggcttctgcaaagagaaaactggtccatctccaaaggggcccaactaggggatggttgctgggttggtctcccacagtgtcacagttgggaagagactgttagtgacttgggcacaggatggcactcctgctcatttccacacaatggcaggtcccaggagttgcagcctcagtccctcccaggtgcaccctggtgagtctctcctccaggcccctatgtccttcagatgacctcagtgaggatcagctcagtctaccagagagactctaataccattaagcctcataagggcagattttcccaccctctccccaacaacttttgtgtggtatgctccaaggataatgggtggtgtagcctcacccttccccagaacatagggtaacccttgccttgcgtctacctaaccacaaagaaccactcaaggggatcttcttgaagatcagtaccaccattggcagtctctattttgaatttgtaaaacgttgcatgttgctttcttattccatttctgtgcacagtcagcttctgcaaattgtttggatgcatcataacttacttaaacaatcccttagtaggttgtttccagtcttttgctaaccaatcaacaatgcgacagatatccttaataggcatcactgaacatgacaaaatgaattaaatgcatctgtagtatactttgaatttgggtagataacaccagttaatttggtctccatagagatttagtaactcacctaactcatagcaggtggagctgggattcagactcacgttctctaggccagagttcagcctcataaccaccaaggtaaactgcctttttgatgttttttgtttgtttgttttgagacagggtctcactctgttgcccaggctagagtgcagtgttgtgatcatacctcactgcagcctcaaactcctgggctcaagcaatcctcccacctcagcctcccaagtggttggaactgcaggcatgctaccatgccccactaattttttttttttttttgtacagatgaaggtcttacttgtttcccaggctggtcttgaactcctgagctcaagtatccacccaccttggcctcccaaagtgctgggattacaggtgtgagccactgcacctggccacctttttgaaatttgccagtctgagatctaaagactggtacttttcagtcattttaatgtgaatttctcttactacgaaagagtaaacattgtatcatagcttagtttgtttatttttctgtgaattgtctatacctagtatttgcccatttttccattaaattattggcttgtttccatatcaatttgtaagaattctttatatattagggaaactagtcctttctgtattcagaattgaaaatactgttcccaggacgggtgcggtggctcatgcctgtaatcccagcactttgggaggccaaggcgggtggatcacttgaggttaggagttcgagaccagcctggccaacatggtgaaaccctgtctctactaaaactaaaaaaattagctgggcgtggtggcatgcacctgtaatcctagctattcaggagactgaggcaggagaatcacttgaacccgggaggtggggagttgcagtgagtcgagaatgcgccattgcactccagcctaggcaacaagagcgaaactccatcttaaaaaaaaaaaaaaaagaaatactgttcccagcttgtcttttgacttaacttataatggttactgccatgaagaaaatagatttttatatccattttttattttatggattctgaacttagttttatagttggacaaaattttcatttatgaaataataaaaaaaactctccaatggatttttcaagtatttcatagtttttctttttttttcacatctaaatattgggtacatttggaattcgtcccagtgaaagatacgtatccaatattccccccagatggccactcagttgtctccacactgttttttaaattacctatcagtcccattgatttataccacccttatcatacattaaatcccactggcaacattcaatgatagcttcttttaaaaaatgaacgaaacgtcctaggcgtaggcaccctatttcactccctttctccactacatttatcaatccatatcaggaacaccttaaatatttgataacagagcccaaccatagaattttggttgaagtatattcttttacatctccctgatggagtactatgcaacttttaaaacaaatattataaagattatgttaaaacatgagggaaatacttctgatgaaaatgtcaagtgaaaaagaaagaatataaactttatgcaaaccaagaatatgaccacactgtgaaaaaatgcacagaaaagaatcccatgagcaaaataccagaaggatgatagcaaagttattgggatatgagaggagagatttccccgatctttttccctccaaatcttttgtaaagtgatgatattggcataattttcaaattttcactttttttcttttttgagacagagtcttgctctgtcacccaggctggagtgcagtggcacgatctcagctcactgcaacctctgcctcccgagttcaagtgattctcatgcctcagcctcccgagtagctgggactacaggtgcatgccaccacacctggctaattttttgtatttttagtagagacaggttttcgctgcattagtcaggatggtctcgatctcctgaccccgtgattcaccagcctcggcctcccaaagtgctgggattacaggcgtgagccactgcgcctggtctattttcactttttaataacggcattttgtccgtgtgtgtttttctcctttgcctcaagagaattcatggaaatgatggtaaagaaatgaaaagatggcctggtgcagtggcttatgcctgtaatcccagcactttgggaggctgaggtgggcggatcacgaggtcaggagtttgagaccagcctggccaatatggtgaaaacctgtctactaaaaatacacaaattagctgggcatggtggcatgtgcctgtagtccgagctactcaggaggctgaggcaggagaatcgcttgaacccgggaggcagaggttgcagtgagccaagatggctccactgtactccagcctgggtgacagagtgagactctgtcccaaaaataaataaataaataaataaataaataaataaataaataaaaagattacaaactcacaagtccaaaaaagaataaaagaggaagagaagatctcatggttggaaaatcccagcatgtttgtgggagacagcaagctgatgatagagtggtaacagacaccacagagatgtgaaggaagcaaccagaaggcctgggtggggcgtgaataaagtaaaacatgtcacctgtggatgggactccagaccccttctgggagacatcgctgactcacggtgtgtgcccttgggccaagacacggagaagtgctcatgcctcttttctcccaactgaacaagggacactgtgtttaacatctctggcttccacttcgagctgtggggagagttaattgctgtttgagaaaaggtatatgagctggtgggataaaagacttgacaggaggagggttattaccagtcaagtaacccttttttcctctttctttctctctctctctctctctccttccttccttccttcctcttcttctttccttccttccttctttctttctttttttctttctttccttctttctttctctttttctttctttctttctttttcaagacggagtctcgctctgttgcctagactggagtgcagtggcaagatctcggctccctgcaacctccacctcccaggtttaagcaattctccttccttagcctcctgagtagccaggattacaggcgctcaccatcaagcctggctaattttttctatttttagtagagatggggtttcaccatgttggccaggctcgtcttgaactcctgatctcaggtgatccacccgcctcggcctcccaaagtgctgggattacaggcatgagccacctcacccagcctaagtaaccctttaaaccctctgatcctctcatgctcacagaggaccagcactcaggtgtatagctaggcagctgcaggtgcagcctgatgcacgctttggccaaatactcatccctgtgaaaacagagtagggatggccaactgcaaaggcatgaatgggtgtgaggctcccagtcaagacaccagcccccatgctttcctgggcagctacttcccctagagctagtaacatgtcctccttggtcctcccatccagtaaccttgttcctctccagatctggagccctgtcttttttttttttttttattttggagtctcactctgtcgcccaggctgaagtgcagtggcatgatcttggctcactgcaagctctgccttccgggttcatgccattctcccgcctcagcctcctgagtaactgggactacaggcgcctgccgccacgcccggctaattttgtttttgtgtttttagtagagacggggtttcaccgtgttagccaggatggtctcagctggtctcgatctcctgacctcgtgatccacccacctcggcctcccaaagtgctgggattgcaggtgtgagccactgcgcccggccaaggagccctgtcttaaactctcacctagtgtctcttgttgccttgtcttgctcctaatcatcaagacaagtccagcttccacaccctgggagccccaatgacctagagtttctgctcagattacaacagtcttgccaagatacaggaatgtggtaaaaatttagttatctccaataaatggatggtgttggcagatgcatctgctcaggagggacacacacacacacacacacacacacacacacacacacacacacactccatgacctggtgggcttggatccagtctcttttctatggctgagaaaccagatggggctaaaaatattcattcctttaattgattgtttttaaacctttctttgagagaatgaatttctaagcccaggaatgtagctttgaagaccacaataatcatttatttaaaatccactctaggccaggcgcagtggctcacacctgtaatcccaacactttgagaggccgaggcaggtggatcacctgagatcaggagttccagaccagcctggccaacatggtgaaaccccgtctctgctaaaaatacaaaaaattagccgggcgtggtggctgggccctgtactcccagctactcaggaggctgaggcaggagaatcgcttaaacccgggaggcagaggttgcagtgagccgagatgatgccactacactccagcctgggtgacagagcgagactctgtctcaaaaaaaaaaaagggaagaaaatccactctaggctgggcacagtggttcatgcctataatcctagcacgttgggaagctgaggcggtagaattgcctgagctcatgagttcaagaccagcctgggcaaccagtgaaaccccatctctaccaaaatacaaaaaattagctgggtgtggtggcgcatacctgtagtcccagctactcaggaggctgaggcacgagaattgcttgaacccaggaagcagaaggttgcagtgagccgagattgcgccactgcactccagcctaggcaacagagtgagactctgtctccaaaaaaaggaaagaaaatccactctataagtcagaacctgtcgcagatcatatgaaaatatgaagaaatatgatccccacctcagagctagctagactatttatacttctcttaaagacctaagcatacttttctccatgagagaaggaaccatctctgtatctctgtcttatttactgcttcgtatttcttttcttttctttcttcttcttttttttttttttcgagatggagtctccctctgtcgcccaggctggagtgcaagtggcacaatctcggctcactgcagcttctgtctcctgggttcaagcaattctcctgcctcagcctcccatgtagctgggactacaggtgtgttccaccacactcgcctaatttttgtatttttagtagagacggggtttcaccatgttggccagctagtctcgaacacctgacctcaagtactctgccagccttggcctcccaaagtgctgggattacaggcgtgagtcactgcgcctggcctgctgcttcatatttcatttcattcattcaggaaatattttatgaacatctaccatgtgccaggccactgggataaaacagtgaacaaaaacaaaatatctattctcatggacttagattctagtgagacaaatagacaataaatacacgaacaaataaacccataacatgcaaagtgatgataaagccttaggaaaaataaagaaaggcccgtcagccatgtgagtatgtagcaagaaggcaccctctatgaagcagagaacaagcccttcccagataccaaatcagctgatgccttgattttggactttccagcctctagaactatgcacaataaattctattgtttttaaattttctagaaaagaaaaataaaggagggtaagggaacaagagtggcagaggacattatttcacataggttagttggggagacttctctgataaggctaagtttaagcagagacttgaattaggcaagggagcagtctatgtggatatctgggagaagatggagctgtaaatgcaagatcctagaggaggaaacagccaacagtgttctgtcggagaacagcaatgagaaaagggtcgcaagaatggagtgaacaaatgagccacacatggtggcacgtgcatgtgaccacagccacttgggaggctgaagcatgagaatcacttgaacctgggaggcagaggttgcagttagccaaggttgtgccactgcactccagcctgagcaacagagcgagactctgccttaaagaaataaaactaaattaaaaaatacagaatggagtgaacaaagttggaattcaaccagaaatatgattagggagagggagtggtattatcatgtggagccttttagacaaggactttgtgtaagcttttcatggaatatagcacatatagagaaaaggaaacatcgtaagtgtacaactcagtgcatttttttttttttttgagacagggttttactctcgtcacccaggctggaatgcagtggtgggatcttggctcactgcaacctctacctctggggctcaagtgatcctcccacctcagcttcctgagtacctgagactacagatgcaaaccactgcacctggctaatttttgtattttttgtagagacagtgttttaccttgttgccaggctggtctcaaactcctgggctcaagcgatcctcctgccttggcctcccaaagtgctgggattacaggggtgagtcactgcacccagcctgatttttcaccaacccacccatttaaaccatcatcccaaccaagctatgaaacgctaacagcagcttgctgggtgtgggggctcatgcctgtaatcccagcactttgggaggccaaggcaggaggatcgcctgaggtcagaagtttgagaccagcctggccaacgtggtgaaaccccgtctctaataaaattacaaaaattggctgggcatggtggtgcgcacctgtaatcccagctactcgggaggctgacgcaggagaatcacttgaacctgggaggcagaggttgaggtgagctgagattaaaaaaaaaaaaaaaaaaaaaaaaaaagaacactaccagcaaccctggccgggcgcagtgactcacacttgcaacccttggactttgggaggccgaggcgggtggatcacctgaggtcaggagtttgagaccagcctagccaagatggcgaaaccccatctctactaaaaatacaaaaattagccaggcgtggtggcgtgcacctataatcccagctacttggaggctgaggcaggtgaatcgtttgaacccaggagacggaggttgcagtgagccgagatcacgctacttcactccagcctgggcaaaagagcaaaactccatctcaaaacaaaaaacaaaaaacaaaaaaccactaccagcaaccctgaagcctctttcacgcctcctgtcattacttgattttggactttcagtccacactggatcagttttgcctgttttgaactttgtgcttatgaatcacacagtattaccctttggtgtcaggcttcactccctcagtgttatggttatgagatttgtccatgttatcgtgcatagtgatgcttcattttttttcattgccctgtaatattgcactgtgtaaatataacacaattgatttgtccattctaccatggatcaatatttgggttgtttccagtttgggggctatttcaaacgctgcgatgaccattctcatttgtgtcatttggaacacatgagtatgcattcagggtgagattattaggtttaggttttactttttttttttggtagcgggggatggagtctcactctgtcaccccggctgaagtgtagtggctcaatcttggctcactgcaacctccaccttctgggtttaagcgattctcctgcctcagcctcctgagtggctggcattacaggcacccaccactatgcccggctaatttttgtatttttagtagagacggggttttgccattttggccaggctggcctcaaactcctgacctcaaatgatctacccacctcggcctcccaaagtactgggattacaggtgtgagccaccatgcctagccatctaggttttactttgatagatgctaccaaactatcttcagactttgcttttcaaactgaatgaaaagggaaataatttgaaggttcaaagtagaaaaatcccataatctgacttacatctttaaagggtcacatactataaattttgaaagattacattttttaaatattcaccatatgaaacaaaatccaacctgaccagtcccagcactgaaagcatgactccagatttgtacctctagccagaacctctcctctgaactacagaccgttatctccaaagtctgcttgacagctgcacatggatgtccaatgggcatctccacctttccatggccaacagcttctgatattctgccctgagccaattcttcctatgggttttccatctttactaacagcaactctgttcttccatttatttaggctggaaacatgggtatatctttttctctattttctcatgctccacatctggtctatcagcagatcctgtgagctctatcttcagaatattctggaatcacagcttaccactccctaccactacctgtccaaaccaccattctctctctcctagcctactgcagtgcccttttactttttttctcttattttatttatttattttgagatgtagtctcccagactggagtgcactgaagtgatctcaactcactgcaacctccgctgtccaggttcaagcaattctcctgcctcagcctccccagtagctgggattacaggtgcacaccaccatgcccggctaatttttgtatttttagtagagacggggtttcaccatgttgcccagcctggtcttgaactcctgacctcaagtgatccactcacctcagcctcccaaagtgctgggattacaggggtgagccacagcgcctggcctgcagtgccctcctaagtggttttgctgctcccacatcctgctctcaccctgttcaggatactatcggtgccgcttcccaaaagatcctgttcaaacataaatcagagcctgtcacttctccattaaaaccctccagtggcttcctgtatcatgctgggtgcaaaccaaagtccatactaccacccacaaattgtagcaagatactgctccttttagccacactgactttaactcctgtgacgctcccgtcctcactccattccagccatgctgttcatcaaactggcctttcccctgttcatcaaactgcccaggtgagctcttaatctcaggaactttacactttctcttcccactgcctagaatgcccttgccccagctaactgccagctcactcccttgcctctgtcaagtctctactcgaaatttcctttctcagcaaggactttcccagccccctggtttgacatttcatacttccccaatgcctgacattacatattgctttcccagctttttttctttgctcagcatttatcactatctcacatgctataatttttatatcttttatcttgtttatcagctgtccctcccagcagaacgtaattgctatgaggacattgatttctatgttttgtttacaaccgtagcctggcatccagaacagggcttggcacatagtaggcacttaataaatatttactgagtgaatgaatagatggctccttgccctagatcttctcttgattacctgtgcttcagaagctggtgagaaatcagcagaggtttctaagcacttccaataagttggagttgccaatagaaacatgttccttctctactctccctccctggcgtgcagggacctgggaaaagcagagatgctgatcgatatctctgactgggaaggaagatgggattaggtactagaaataagaggaaggatgtctccgcccgtctgctcagaggctgcaatctgcttggcatgccgcctgctcccagaaacaggatgtgtccagagaggaagtgactgcagacgtggagtgggggaaaatgccccgtgcctgagacagaacacttgaggctagtcattctggagccttccaagggtccattcctgggggatgagtaaaatccgctccgcagtctcacagtgactcattctgaatggcggagaatccaaagcccttccctaagttagggcaaaaacaggtgcttcctcctctggggttcccagcttgggtgactgatgctgaaggacagaggatgcccacacaccttgttggaggctctgcaggaactgacaaagaaaatagcatggtagaaagtcattttaaccaatcttctcttccttgacttgaggtcagaagtagacaagtctagaaggccattgcccaggtgtttcttaggaaatccgcttcctgcaccttccccagtagcgggtaaagaggcaagatcggcctgactgagccctggggcctcaagctcaggcagcctggcagagggagccccctacttcattgagctggtccagccccaaggccacagaggctttttttttttttttttttgatatggagtcttgttctgtcgcccaggctggaatgcagcgacgcaatctcagctcactgcaacctctacctcctgggttcaagcaagtctcctgcctcagcctcccgagtagttgagactacaggtgcccaccaccatgcctggctaatttttgtatttttagtagagtcagtgttccaccatgttggccaggctggtctcaaactcctgaccttaggtgatccacttgcctcagcctcccaaagtgctagggttacaggtgtgagccaccacgcctgggttttttttttttttttttttttttttttttttttaatttgagacagggtcttgctttgtcgcccaggctggagtgcagtggcacccttcacctcctgggttcaagcgattctcctgcctcagccttccgagtagttgggattacaggtgactgccaccatgcccggctgatttttgtatttttagtagagatggggtttcactatgttggccaggctggtctcagactcctgacctcaggtgatccatccacctcagcctcccaaagtgctgggattacaggcgtgagccactgcacctggtctggcccagccataagtcttattttgcagcccaaagagagaaaaacagtccctacagacactccccaggggctctgccttggtgggctctcaaatttggactctgcctgtaggccaaagggcactaatgtcataaaacccacaccaggaagcttgcgaagaaaaacaacttggctgtttaagaaaagacccacaaacacagtgccgaacatggaaatggacagaggcatcgatgcaagtttccagaagggcagaaaaagctagaaaactctcccaacactgagtaaccacagcaatctctagacaggttctgggccttatgtttacgatgaaatgcaggaagcagctcaaagcctagaatgttattgtgagcattaatattatgttcataaaagctgtggtatttttttcttcttctctgaaagccaaagcaagcatctctaaacttgtccttgataagaggttaaatatagcaggaggtgtcatgccagtatgctgcttctaatttatttacagaaaagagcccctatggtgcaagacattctgtaagctgcttttttgtttgtttaaacagttgatcatgagcatcttttcatgtcggtatgtatacatctacacggttctatgtgctttctgtaaactaagaaactaaggggtcttcctcagtgaaagaggtagagcttttgtaggaaatagcctggaagtgggcgtggccatagaggcccctgggccccagccaggcatccattcttcctcccggctgcggctgcggtgaacattcttgtgaccaggagctcacacttcagccctttctcatattcagcagaaactggcgcatctcaagtctgagccccacttcctgttacagccagaaagccgaggaagcaccaccccttggctgtctagagctccccaaatccctgcaatttcttctcaccttgccccaagctcatgtcttcctttctagaagctggagatgaaggcaaagcaaccattcttcctgggagagtcaccaaccatccccatttgcctgggactagggggtctcctgagttgtgagacttcaggttttaaaaccaggacaaccccaagaaaaccaagatagttggtcagcccactcccagaactggaggcatggccaatcctgacagagctgctggaggtccccttttcacagttccaacaagggtcaggttggaattttccagaaggcatacctacggagattctccagctgggcctgcttgagtcccatgtccaccccagagataatcgccaggacagagagtggatgcagaggaggcagatgagaaccgcccaccaggaaacaggcacgtcccattctacaaagccttcacatgtctgaagccagcctgacctctccccagtttctccatttgtcctcaaatgcagggcttcccaggcccttccccatctgtggtattagggaggggaccactctggaaggagaccctaggctttccctcccacctgagtgtcagtattctcagaggagccaatctggaaacgagatctcaggaggtctgaggggagctgtggccaatgggcaggcctgcgaaggcagaagacaccgactccactgctgggctgtgggagaccctcggggccagcaaagtcaggcaaccaggataggctcatgtttaagcaaaatgtcaggaacaattttcaaataatcgactccatttgctccaattcagccttccaacactgcttcaggtaaaatgcctctttttacatttcaaccaacgggtcttattgttaatctggaaaatacacaataaatgcattactttccctgtatttccaggctttctagacactctttggcacatgtatggtacttttttagtttaacaattgaacccactaatttcaatgtaaaggtactttgcaggcagacacctataatcccagtactttgggaggttgaggtgggcagatcacctgaggtcaggagttcaagaccaatctggccaacatggtgaaactccatctctactaaaaatacaaaaattagctgggcatggtggcaggtgcctgtaatcccagctatttgggaggctgaggcaggagaatagcttgaacatgggaggtggaggttacagcgagctgagatcacaccattgcactctagcctgggcgacagagcaaaactccatctaaaaaaaaaatacaaggctgggcaaggtggctcacacctgtaatctcagcactttgggaggccaaggcaggtggatcaactgaggtcaggagttcaagaccagcctggccaacatggtgaaaccccgtctctactaaaaatacaaaattagctgggtgtggtggctcatgcctgtaatcacagctactcaggaggctgagacaggagaattgcttgaacccaggagacagaggttgcagtgagccaggattgtgccattgcactccagcctgggcaacaagagtgaaactctgtctcaaaactaaaacaaaacaaaacaaaaacctcaatgtaaaggtactttgcccactgagcaccatggctcatgcctgtaatcccagcactttgaggctgaggcgggcagatcacctgaggtcaggagttcaagaccagcctgaccaacatggtgaaacccccatctttactaaaaacacaacaattagccaggcatggtgatgggtgcctgtaatcccagctactcgggaggctgaggcaggagaatcgcttgaacctgggaggcagaggttgcggtgagccgagattgcaccactgcactccaacctgggagacagtgaaactccatctcaaaaaacaaaaaaaagatactttgcctgaaaacataatgagcatattatttgaaaatgtcagtagcatacacttaaaaaaaaagtaaataaataagtaatagagacaaaagacaaatctcccatgtagtgttccagataattcctgtagatactccacctcataactcccactccttaaacgtgggttgtacatggtgaatgaccaaagaggatggtatggaaaacgggaagaaaagagtaactttacagtggagaaactgacaaacactacttcagccaggtaattaatagcggagagagtgagcgtgtatgtcctgtgtttctcaactttgctgacaccctatagtcttgtggggagcagtctggtgaagcataaagatcttggatctggagtcagccagctctgagctccaatcctacctctgtgtgctcttggagcagtcactcaacctcattgagcctcagtttccccatctgtgagaagaggattagaatgcagggatgaggccaggtgcagtggttcatacctgtgatcccagtactttgggagatcaaggcaggagaatcacttgagcccaggagttcaagaccagcctgggcaacaaagagagacctccgtctctacagaaagttaaaaaattagctgggtgtggtgatgcacacctgtaatctcacctatttgggaggctgaggtgggaggatcacttgagcctgggaggttgaggctacagtgagccatgatggtgccattgtactgcagcctaggtgacagagtgagactctgtctcaaaaaaaaaaaaatttaaattaaaaaacgaaaagaatgtctatctggcccttagcaaccgtgagtgctggaggaatcatgttacatttgaaggcagctccgaggtactggagtggagtcgggtggcttcgcagaagggtcctgctgttaacacactttccctcgggcagatcccctcatactgcccggaccttccagtccttcactcattcttcactaaaggctgcaaggggccagggcatgatggctcatgcctataatcccagcactttgggaggccgaggtgggtggattgcttgaggtcaggagttcaaaaccagcctggccaacatggtgaagccccgtctctacaaaaaaaaaattacaaaaatacaaaaattagccaggcatggtggcgtgtgcctataatcccagctactccggaggctgaagcacgagaatcacttgaacccaggaggcagaggttgcagtgaactgagatcatgccactgcactccagcctgggcgacagggcgagaccctgtctcaaaaaattaaaaaaaaaatgctccaaggtcaagggcttttcagaccctcttggtccatttggttagggggtgttttcacaaagctttgccttgttagctttatgggacccggagggcatactttatagaacacaatcttcataccagtgtctctaaccacaaaccccaagagtctgaacgttgagacactcaggaagttgaaagggacctctcctcttcagaggcccggcccagctctcaggaatggcatgcatcaaaaggcaggaagtccctcacaagtctgtcctatcaagccaccagacactggttacctttatgtggctgcacaagaggctgagttcccagggaggggcgaggtggtctggggctttcaagccgtggtggaacccacgcctgagaagggaggcctgccgctcccaccacaggaagcctggcccccgccagcaacagagagactcagagcccaggcctcagtgccctcatgggataagtggcattttggttcctgtttccttccctctctgtttttctttttcttttcatagattctccaagcaaatattaaacatgtcctgcaaatctcaggaatcagcacacagagaaacacaaagaagagtaagtggccttcttccaagacctggtttatcaaaggtctgaggcagtcctgatccgctgctctcctcctgctggctgagccttgccactggctcagtggcccagggtgccagctccctttcctgggcctcccgggaaaggggagggagaaggtcgagggagcaagagggttccagggctgcctccagggctggcctggcaagttgcagctctgtccctggcgatttccctgcagccaatggctgtggaagaggaaaggagaggaccttttgatgtggtggagaagcatcattgtagaagggagaggaataagtaaaaggttggccagggaaccatggccgggcacggtggctcctgcctgtattcccagcactttgggaggccaaggtgggcagatcacttgaggccaggagttcaagaccagcctggccaacatggtgaaaccccttctctactaaaaatacaaaaattagccgggcgtggtggtgagcacctgtagtctcagctacttgggaggctgaggcaggagaagcacttgaacccgggaagcggaggttgcagtgagccgagatcgcgccactgtactccagcctgggcgacagagtgagtgagactccgtctcaaaaaaaaaaaaaaaaaagtaaaatgttggccagggagccttgctggcctcctgaaggcagccaaacattaaacacacctacagtcacagagtccagcttaaggaagaggcagaccagaaagtgaaagtgaagaaagaacgggaggagagatgggtgggggcgcggatcaaggcagaaaagggaggcaaaaggcaaggctcctagggacagagagtggtgacatgccagcttctgttcgttaaaaccctgctctggaccatgaacactgctaggcaatttcgttatgacagctccttgcatcctcccagcattttacagctaaggaaactgaagaccgtgaggttaaattcttcacccgaggtccacagctagggattagcagaatcagtgtttgaacccaaggctgcctgactccagtgtcacacccaaactgttcctgtctctctgttagcagttcttagttgctggggattcagactctattttgttgcttgtgtagttcaatacagctccccccactgtggccacattgcagcctacagatgcaataaaaaggaggggaaggcatgcatttcctttaagggtacacctgaggtcaggagttcgagatcagcctgaccaacatggagaaacacaactctactaaaaatacaaaattagctgggcattgtggtgcatgcctgtaatcccagctacccgggaggccaaggcaggagaaacgcttgaacccaggaggcagaggttgcggtgagccaaggttgtggtgagccgagatcacaccattgtactccagcctgggcaacaagagcgaaactccatccatctcaaaaaaaaaaaaaaaatgctgtgaatcttgaacagagaatgcaatagacagcaagaaaggtctggtggcatcttcgaaggagccttcatctcctatactttcagggtggatatgatggaagactcagcccagggcctcattgtgcatgtaggagttccaagtaaatgcttaggaaagggcatagtggggacgtagtgggaccctgagacttagaataggagcatctaagtggtcacagacaaggctgagactctggcacttttgaattctcaaatccttcaaagctcccttgtctgttcaggcaggtcctcccgtgtagaggtaaccaacttatccctgcctaaggaaccttctgtgactgcacctaggacagttgcttcactaaaaagggacaccagatcttctcttcattcctccagcatcaaaaggagagttagatcccaacatagcccacttgggcagtacaaggcctgctctagaaagagaatgtctatacactaaagaagtggcaggaccttgccagttcaaatccacaagggtcttgggagcacgtgtcggagaggattctaagcattgtgttagcctaaagatggtaaacacaaggcttggctgggcacagagcctcgtgcctgtaattccagcactttgggaggctgaggcgggcggatcactcttcaaactcctcaaactcaggagtttgagaccagcctggccaacatggtgaaacctgtttctactaaaaatacaaaaaattagctgggcgtggtggtgggtgcatgcctgtagtctcagctactcgggaagctgaggcaggagaatcgcttgaacccaggaggcagaggttgcagtgagccgagatcgtgccattgcactccagcctgggtgaaaaagtgagaatctgtgtcaaaaaataaataaataaataaaaataaataaataaataaaaggcttgattgggctgaattcactgatacactcacccaggtttgggctttggagttggcatgaatagtctacaatggctaactcagacttgacttaatagagacgtaaagttaaagttccaccacccagaagcagctgggttagagggcggtgaaatggctgctgaaagttcatttacagggttagcctggagacaacaccctgttggcttcaagtgttggcctacaggttgcagttatgtcttttaaaagctgctaacatttggaattgtctccttcaaaactagaaagtgtacatctagatgccgggcgtggtggctcacgcctgtaatcccagcactttgggaggctgacgcaggtgcatcaggaggtcaggagtttgagaccagcctggccaagaaggtgaaaccccgtctctactaaaaatatgaaaattagctgggctctccctctccctctccctctcccctctcccctctcccctctcccctctccctctcggtctccctctccctctctttccacggtctccctctgatgccgagccgaagctggactgtactgctgccatctcggctcactgcaacctccctgcctgattctcctgcctcagcctgccgagtgcctgccattgcaggcgcgcgccaccacgcctgactggttttcgtacttttttggtggagacggggtttcgctgtgttggccgggctggtctccagctcctaaccgcgagtgatccgccagcctcggcctcccgaggtgccgggattgcagacggagtctggttcactcagtgctcaatggtgcccaggctggagtgcagtggcgtgatctcagctcgctacaacctccatctcccagccgcctgccttggcctcccaaagtgccgagattgcagcctctgcccggccgccaccccgtctggaaagtgaggagcgtctctgcccggccgccatcccatctaggaagtgaggagcgcctcttcccggctgcccatcgtctgagatgtggggagcgcctctgccccgccgccccgtctgggatgtgaggagcgcctctgcccagccgcgaccccatctgggaggtgaggagcgtctctgcccagccgccccgtctgagaagtgaggagaccctctgcccagcatccgccccgtctgagaagtgaggagcccctccgcccggcagccgccccatctgagaagtgaggagcccctctgcccggcagccaccccgtctgggaagtgaggagcccctctgcccggccgcccctactgggaagtgaggagcccctctgcccggccaccaccccgtctgggaggtgtacccaacagctcattgagaacgggccgggatgacaatggcggttttgtggaatagaaaggggggaaaggtggggaaaagattgggaaatcggatggttgccgtgtctgtgtagaaagaagtagacatgggagacttttcattttgttctgtactaagataaattcttctgccttgggatcctgttgatcggtgaccttacccacaaccctgtgctctctgaaacatgtgctgtgtccactcagggttaaatggattaagggcggtgcaagatgtgctttgttaaacagatgcttgaaggcagcatgcttgttaagaatcatcaccactccctaatctcaagttcccagggacacaaacactgcggaaggccgcagggtcctctgcctaggaaaaccaaagacctttgttcacttgtttatctgccgaccttccctccactattgtcctgtgaccctgccaaatccccctctgcgagaaacacccaagaatgatcaattaaaaaaataaaaattaaaaaaaaaaaaaaagaaaagaaaattagctgggcatggtggtgggctcctgtaatactagctacttggcaggctgaggcaggagaatcacctgaacctgggaggccgaggttgcagtgagccaagattgcaccactgcactctagcctgtgcaacagagcaagactctgtctcaaaaaaaaaaaaaaaaaaggaaaagaaaaaagaaagcgtatatctaggaaacagagggtgaaagagtagctactctcatgcttacacctaagaacacacttgaagaactcttgctgcccatccctatgaccttggatttgggagtctgaatattctagtgcctgaggtgggaactgtttctaccaggggattgtactaccatggtcatggttctgataaattggaagctaaggcttccttcaggccatctgaggatcctcatgtcactgatccagcaggcagggaaggaaagacaaatgtctttccttttggccacccaacatctgaaccttcttcctatatatctacggtataagcagatgacctgggctcagctatataaaaacagccccttgtcaggcgtggtggctcatgcctgtaattccaacactttgggaggctgaggcaggagaatcctttgaacctgggaggcggaggttgcaatgagccgagacggcaccactgcactccagcctgggcgatagagcaagactcagtctcaaaaataaaaataacaaaattaaaaataaaaacactcagccctaagtgaaatggaacatgagtagccccacctccagtggcataggatagagttcctggagcaggtgcagcagtgctactggcagtctgaaggattcagtgctggagaggtgggaggagcaagcagcagcatctacagttcagagaaccagtcttccctgtaattcagagagatgccactctcctcctcatgaatcattttaccacctaaaccgctagagttggctcctatggcctgtgactgacaactcttactgaagctgttgtactattctctatttctctgtttttgaagtatttcataataaagaaaatgaataactaaggaggaaagatgtaggatcatcttaataaaagcagaaaaagcatgcaataacattcaacattcataaataacagtaataggctcggcgtggtggctcacgcctataatcccagcacttcgggaggccaagacgggcagatcacaaggtcaggagtttgagaccagcctggccaatatggtgaaaccccgtccctactaaaaaaaccaaagtgtgaccgggtgccgtggctcacgcctgtaatcccagcactttgggaggccaaggcgggcagatcatgagatcaggagttcaagaccatcctggccaacatggtgaaaccccgtctctactaagaatacaaaaattagctgggcacggtggcaggtgcctgtaatcccagctactcaggaggctgaggcaggagaatcacttgaacccgggaggcagaggttgcagtgaggcgagatcacgccactgcactccagcctaggtgacagagcgagacttcatctcaaaaataaataaataacagtaataacaaatccataggaaactagactagctgccaacttccttaacatgatgaacattttctatcaaaacacacaggagaaataataatggaaatgtggaagccttctctttaagagcagaaacaaagaatgaaagcccattgtcaccatttctatttaacactggagggccaggctgggcgcggtggctcatgcctgtaatcctgtgactttgggaggccaagatgggtggatcacttgagatcaggagttcaagaccagcctggccaacatggtgaatccctgtctctactaaaaatacaaaaattagccaggcatggtggcgggcgcctgtaatcccagctactcaggagggtgaggcaagagaatctcttgaacccgggaggtagaggttgcagtgagccgagatcgcaccactgaactccagcctggatgacagcaagactccatctcaaaaaaaaaacaaaaacaaaaacgaaaagtcccatttacaatagcaacaacagttataaaatgcttaagaataaatccagctgggtgcagtggctcatgcctgtaatcctagcactgtgggaggccgaggcgggcaaatcacttgaggccaggagtttgagacaagcctggccaacatgatgaaactctgtctctactaaaaatacaaaaattagccaggcatggtggtgtgcacctgtaatcccagctacttgggaggctgaggctgaggctgaggtggaaggactgcttaagccaggaggtccgcagaggctgcagtgagtcatgatggtgccattgcactccagcctgggcgacagagccagatccagtgtaaagaaaaaaaaaagtgtagtatttgttcagggagaaacaaagaacccagtggaacaaaatataaccagaaaatgacccatgccatatgaaaacaatatatggcagagaagacattacagatcagtgaaaagaagatagtggtgctggcctaattagttacccaaatgggagaaaatagcttgatccttacttcatagcatacacaaaaataaattataggtgaattgaagacctaaatgtggaggcaaaactccaaaaatggttagaaaaaatatataggggattttgtttatagcagagtagaaaagagtttctcaaataagacagaaaaaggatatactataaaattattttagaaacttcttaccaaaagaaagaaaggaaacaagaaggaaaatttaaaaaccataacaacactgaaaataaagccacagactttaagattcattttcagaaaatattttttaaaactcccataaaatcaagaagaaaataacaaacaacccaagtggaaaatgggcaaaggatattaaaaggaaactcacagaatggtcaagggcatgtgaaaagagcctccaaactcattaacagggaaatgaaacttaaaacaacccggaaagaccactttgtatccctcagcttggcaggagcttgaaggactgacaatggcaagtgttggcaaggacacgcagaaatgggaactcacacacactgctggccagagtgtaaattactacagtcactttgaagaacaatttggccatagctagtaaaatcagtggtgaacaaatccttcagtccaccagttctgcttccggatatacaccataagctcacacacttgcccgaaacggagtaaacaacaacgcacgctgcaactctgtctgtaatagcaaaaaactacaaacaactcaaatattcatcaacagaaggccagagaaacaaattgcatacagctgaaaaaaaaaagaacgagagccacatatatcactatggataaatttcaaaaacaaaattgaaagcatgctgaagtttttttttgtttatttttgtttttttgactgagtctcgctctgtcacctgggctggagtgcagtagtgcgatctcggctcactgcaatcgctgcctcccaggtgcaagcaatcctcccacctcagcctcctgaatagctgggactacgccttgctacttttttgggtgttttttttttctttttttgtttttgtttttgtttttgtttttgtttttttgagatggaatttcgctcttgttgcccaggctggagagcaatggcgcaatcttggcttaccgcaacctccgcctccagggttcaagtgattctcctgcctcagcctcccaagtaactgggattacaggcacctgccaccacacccagataatgtttgtatttttagtagaggtggggtttttccaggttggtcgggctggtctcgaactcccgacctcaggtgatctgcccacctcggcctcccagagtgctgggattacaggcatgaaccccgcgcctggctgagttttttatttgtttgtttgtttgtttgtggtggagactgggtttcaccatgttgatggctttctcaaaatcttaaacacagagttgccctatgtcaccttatgacccaacaattccacttctggctatacatctaagagaattgcaaacatacatttacacaaaaaattgtacacaaatgttcatggcagcattattcataaaagccaaaaagtggatataacccaaatgctcttcaattgacaaatggataaacagaatgtggtatctccatacattggaatgttgcttggcaataaaaaggaatgaagtactgatccatgctacaacagggataaaccttgaaaacacactaagtgaaataagccagacacaaaggacaacagagcgtatgattccatgtatataaaatgtgcagagtaggcaagtccatagacacagagagtagatgagtggttgcctagggctggggaggaagggatcaatggggagtgactgctaatagatgctcagtttcttttagggaatgaagaaatcttctgaaattagatagtggtgatagttgcataactctgtgaatacagtaaaagtactgaaatgtacagtttacaagggttaattttatggcacatcaattatacctcaattaaaaacacacacacacggagaatcttatgttgaagtttgtggtctgctctgcccatttctatatcgcctccaccatttgcccctaggaggaggttcaggacagcataatgggagtgtgagctggacactgttcaaatgcttgccctcctacaaagaccctgaggaaatgaagctggagcccagtgtcagaaatccagttttatacactgcagtgtggtcatcaagaatgtttgccactttctcctatagccaagcaaatgtttaattgtgggaaacaggtgagcttcggagtggcatgtgatggtttaaaaggttacttcatattttattttattttattttttaagacagagtcttgctctgttgcccaggctggagtgcagtggcatgatctcagctcactgcagcctctgcctcctgggttcaagcgattcacatgactcagcctcctgagtagttgggactacaggcatgcaccgccatacctaatttttttttcttttttttttgtattttcagtagagatgggatttcaccatgttggccaggctggttttgaactcctggcctcaagtgatccacctgtctcggcctctgcaagtgctgggattacagtcgtgagccaacgcgcccagcctaaatgtcactccatattttagatctgcttaactactcagaatttacttataagactgctatagtcatgtcacaaagtcatggtagtcttcttgataagcagtcatttttatacattttgtacgcagatctgaatgctgtagtatttccaatgtctaaaatatatgtaaataaaaatataaggccgggtgcagtggctcatacctgtaatcccctttgggaggctgaggtgggaggatcaggatcacttgagcctgggaaatccaagttgtagtgagcccttatcatgccagtgcactccaacctgggcaacagagtaaaacactgcaagagaaagaaaaagagaaagagaaaaagagagagagagaaagagagagagagagagaaacagagggaaggaaggaagaaaggaaggagacagacggggggctgggtgaggtggctcatgcctgtaatcccagcactttgggaggccaaggcaggtggatcacctgaggtcaggagttcaagaccagcctggccaacatggtgaaacaccatctctgccaaaaataaaaaagtttcccgggcgtggttgcaggtgcctgtaatcccagctactcaggaggctgaggcaggagaatcacttgaacccaggaggtggaggccgcagtgagccgagatcaggccattgcactccagcctgggcaacaagagcaaaactccgaatcaaaaaaagaaaaaaaaaagaaagaaaaaaattagcccagcatggtggcacacgcctgcagtcccagctaccccagaggctgaggtgggagggtcattgaacccccaaaagtcaaggctgcaatgattcaagattgcatcactgtactccagcctgggtgaagggagtgagaccctgtctcaaaaaaaaaaaaaaaaaaaaaaaaagctctgaatctataggttccagccctgagaaattctggataaaatggagttaacagttcacctgcctcaggtgagataatataaaactagaaaggtccataccattgtaatatctaattgaatctatttgtcaaaacagtacccaaatgcagtatgttcagaaaccttatagtgttaggtaataataaccatagacaagataaaaaatatgggctgggtgtggtggctcgcacctgttatcacagcattttgggaggccaaggtagtaggatcactggaggccgggagtttgagaccaacctgggcaacatagcaagaccccatctctataaaaaaatatatatataaagatatatattatatatatatttgtacatgttaacttgaggtgaggggtgcagggagggtggaaaggagaaagtaataatattaagcatcagtaaacaactctagagccaggcatggtgactcactcctgtgatcccagctttttgagaggttgatgcaggaggattgcttgaggccaggagttcaagaccagccttggcaacatagtgagactctcccatctctaaaacaacaacaaaaagttaattaaaaattaaaagaaaagaaaacttcatagccgtcttctccaggaaaacaagtcccaaagccacttgccactgatgcagaggtgcgcagagcccgaggaacacggaaccatagcagctctgcaagttgattttattccaggctaaaagatgctacttctcaaagaaaggagcttggagcgtctctgtttatgaattcatttttcaggggtggggtgatttcaagagtccaggctgtttcctgaccatgcacactgtgccggcctggaagcctcaggccccagccaggctgaccacgagccagacccggagtaagcttcgtcccacgcttcctgtcggtccaggcagcctgagtttcctggtgacccttccctgcacccagctgattcaaaggcctggcaaggcctggtgccagccaagaaaatctgaggcagccaggtttgttatttcaaatctctaaaccttcagacctttgtgcttggcttacatatgtgaaagttaaaacaaggatgtgtgtcgcagtggtgattataattcaagtaagcaaagatccctgcatgaccagccttcaaatgtcagcccatgctgaagttaacacatttaactcatagaacaaaataattaaaatgaggagtagatgcaaaatggtactgccattctagaaaacagtttggcagtttcttataaagttaaacgtacacttaccacaagaaccagcaatcactctcctgggtatttatcccagagaaatgaaaatttatgttcatataaaatattgtacacaaataattataacagctttatttgtaatagtcgtgtatcagtcaggattctccaaagaaataggaccaatagaagagagatatatacataataaatcatatatataaatgaaatatataagaagctatatatatatgtacacacatacagatatctctcagagttctccaaagaaatagaaccaactatatatatattatatgtaatatattatattacatatattacatgtaatataatatatattatatataaaatgtatgtaatatattatatataatatatgtaatataatatattatataaaatgtatgtaatatattatatataatatatgtaatataatatatataatgtatgtaatataatatatatattatatataaaataaatcatggccaggcatggtggctcacacctgtaaactcaatactttgggaggccgaggcaggaggatcacttgaacccaggagtttgagaccacctgagcaacatagtgagaccccgtctctacaaaaaacatttttttaaattagccaggtgtgagccaggcatggtggctcatgcctgtaatcctagcactttagggggctgaggcagcagatcaccttgagctcaggagatcaagaccagcctgggcaacatggtgaaactccatctctacaaaaaatacaaaaattagccaggcatggtggcacatgcgtgtggtcccagctactcaggaggctaaagctggagaatttcttgaactggggaggtggaggttgcagtgagccaagatcaggccactgcactccagcctgagtgacaaagtgagaccctatctcaaaaaaaaaaaaaaaaaaatgtccagcagctactcaggagactgaggtgggagcattgcttgagcccaggaggttgaggctgcagtgagccatgatcacaccattgtactcaagccttggtgacagagcaagaccctgcctcaaaaaaataaaaagacatatgtataagaaatgatatatattgatctatatagataaatgatatgtatataataaatcatatatatataatatatacatttattacaaagaattggctcatgtgattatggaggttgacaaatcctaagatgtgcagtcagccaagctgaagaccaaggaggatcgacggtggtgttccagtgccaaggccagcaggctggatacccaggaagcgcagatgtttcggttccagtccaaaggcaggaaaaaaactgatgtctcagctcaaaggcagtcaggcaggaggaattctttgttattcaggaaagatagtctatttgttctattcaggccttcaactgattggatgaggcccacccatcttagggagggcagtcggctttattcagtctattgacttagatgttaaactcacccaaaatcaccctcacagaaacacccagaatactgtttgatcaactgtcaggccaccccatagcccagtgaagttgacacataaaattaaccatcacaagccaaaaattagaaacaagccaaatgtccctcaacaagtaaacagataaacacatgatggtctatccattcagtgaagtaactcagcagtaaaaggtaatgagcaattgatccatgcaacaatgtggatgggtctcagggctttttgctgagtggaaaaagccaatctcaaaaggccagtctgattccatttatttaacattctttcttttttttttttttgagatggagtcttgctctgtcgcccaggctggagtgcagtggcctgatcttggctcactgcaacctccacctcccaggttcaagcgattctcctgtctcagcctcccgagtagctgggactacaggtgcacaccaccacgcccagctaatttttgtatttttagtagagatagggttttaccatgttggccaggatggtctcgatctcatggcctcgtgatctgccccctcagcctcccaaagtgctgggattacaggcatgagccaatgtgcccggccaacattcttttgttttttgtttttttttttgagatggagtctcgctctgtagcccaggctggagtacagtggcacgatctcagctcattgcaacctctgcctccctggttcaagtgattctcatgctctggcctcctgagtagctgggattacaggtgtgcaccaccatgcccggctaatttttgtatttttagtagagagaaggtttcaacatgttggctaggctggtctcgaactcttgacctcaagtgatctgcctgcctcggcctcccaaagtgctgggattacaggcatgagtcactgtacctggctttatataacattcttgaagtgacaaaatcatagagttggagaatagatcagcagttccaggggttatggtaggaggaaggatgtgactgaggggtaacaggaagaaattttatcttttctttttttttttttttgagacagagtcttgctctgtcactcaggctgaagtccagtggcacgatctcagctcactgagacctccgcttcccaggctcaagcagtcctcccacatcagcctccctcacagttgggactgcaggagcgtgccactgggctcagctatttttgtattttttgtagagatggagtttcatcatgttgagatgagatcaggctggtctcaaacttcggagctcaagtgatccacctgcttcagcctcccagagttctaggattataggcatgaggcaccatgcccagccccaggaagaaatttcttagtggtgatggaatacttctgtgttctcattgtggggatggtcacttgaatctatgcatatgataaaatttcataaaacttgtccaggctcagtggcctgtaatcccagcactttaagaggccaaagtgaaaggatcacttgagaccatgagtttgaggttacagtgagctatgattgtgccacttctctccagcctgtctcaaaaatttttttttcatagaattacatgccaaaagaaaaagatgagtgtctctttcatgtgtatctattatgttcccaacactgcttttgggactttacacacagtaactggccgggtgcggtggctcacacctataatccgagcactttgggaggccaaggtaggcggatggcttgagtccaggggttcgagaccagcctgggccatagtgagacctcatttctacaggaaaaaaaataataatgatggtgtgtgcctgtagtctcagctactcgggaagctgagctgggaggattgcttgagcctgggaggtcaaggctgcagtgagccaacattgcgtcactgcactccagcctgggcgacagagtgagattctgtctcaaaaaataaaaacaaaaacaaaccagacagacagtcaccttaggaataaacactatatccccactttatagtcaaggaaacactgagagagtgtaatcaccacccagtcacatagctggtaagcggcaaaaccaggatttaaaccaagtctacctgactccaaggctttggccctttctcatgttgcctgctaacatacacacaagctccaaagaatggggcctccatcctgcccgtgatagatatttctagccctgatgttgcctcgcaccacagcagagtgtcctgcactgtgttttctacattccctggataaacacagaaagtcctgctctgtgaagaggccatcaaaattagcacagagatgaggcattggagagcaaactccaggacaagtccagagggacagatggctcagcccgaggtcagggtcctctttatacctcacttgaatttaggcggcaggctgggcatgatggctcatgcctgtaatcccagcactttgggaaaccaaggcaggtggatcacctgagattaggagttcgagaccagcctgggcaatatggcaaaaccccatctctaccaaaaaactagccaggtgtggtggcacgcatctgtagtcccagctactcaggaggctgaggcaggagaatcccttgagccagggagacggagcttgcagtgagccaagatcgctccattgcaccccagcctgggcaacagagtgagtctctgtctcaagaaaaaaaagaagaatttaaatggcaaccaaattcccaggggtgtgtgtctctgggatgcctcccctgactccctccaggctgagctgcggacccatcatccacgctcccacatcagcaagatttacgttaatcaaggacctagtgtgtggctctagaatcaccaatgtatcctttgttgatgcgggagcctctcacagaacttggcctgggtagaagcgcagtaagcgtttgctgagtgaatgaatgaactgcaagaatctcatgcaagggctgtggactcaaatgccttcagaggccaggcagacaccaccaatgaatgaggttgggggtggtgattcgtggagagtggagaggacaggggtggagtggggacatgtgcccgagccaccggggcagctgccactccgcttgccctcatgccaccaggcaggaatgtgggccatctattaccacatctgatttttcaaaagaagccaaaatccagtcttttatgatgagcttctgattttttcacgttgcggactaattttaagttttttaaattaagtgagggccaaacgaaacacatatgctagttgaatactgcccagaggacatggtttggaatttctgctttgaaacttcaggatgttccagcgtttctgatgcagtgacagtgattttcctgatgactacgagacaaaggtgtccacagcaggtaaaggaaagccagtgccaccaacagccataagccaattccatgtggacggcctcctctgctgacatcccactgggagagccggtaagaactctgaaggcggggttgcagggaggacagggaggagggtacagatgacctatgactgctggctggcatagtacgactcttgtataacttgaattctcatgaaacatgcatttttgatggattattggattattttcatccttgcactagtggcacaaagaccggacaatcccatgtaatggacaaaagatagtgccacttgcaccagagggaagctaggacaaggctggacaaggtcctgggaaagaggccacaggtggcaaatccaccccgcctgaaggacctcatctgggtgcagacttctacctcccaccattgcttcaataccggaggtctttccttgttttcctcaccagacagttctttttctcaaactaaggaaatgagcacacatctcagagtggccccagttcaaatccttcctctaccattcgctgactgtgatgaacagctttggaatccccatttgtccatctttccaacatgactcatatatgttgatatcacacatcccggatgtgataggatgagggcacttcatctcttaggtgttcttcccaaaattctgcagtcccagtctaatcatgagaagaccagaaactgtcaccagtcagcggagactaaggagacatggacactcaacgcaccatggtgtcctggattaggtccaggaagggaaagaggccattagtaagacaactgctgagacctgaagaaagtgtttagtccagttgaaaaatcatggatctagaccaggcaaggtggctcacacctgtaatcccagcactttgggaggccgagatgggtgggtcatttgaggtcaggagtctgagaccagcctggccagcatggtgaaaccccatctctactacaaatacaaaagttagccagacgtagtggcgtgcacatgtaatcccagctactcaggaggctgaggcaggagaattacttgaacctgggagatggaggttggagacggagtttgcagtgagccgagattatgccactgaactccagcctgggggacagagtgagactccgtctcaaaataataataataataataataaacaataaataataaataataaaataaaaataaaaattatggggcagggtgtggaggctcatacccataatcccagcactttaggaggctgagacaggtggatcacctgaggtcagtagttcaagaccagcctggccgacatggtgaaacctcatctctacagaaaatgcaaaaactacccaagcatggtagcatgtgtctgtagtcctagctacttgggaggctgaggtgggaggattgcttgagcctgggaggtggaggttgccacaagctgagattgcactactgtgctccagccctggtgacagagtgagactctgtctcaaaaaaaaaaaaaagataaataataataaaaatagttaagatggcaaattttatgttatatgtattttaccacactttttttttttttgaaacggagtctcactttgtcacccaggctggagcacaatggtgcgatctcagctcactgcaacctacatctcctgagttcaagcaattctcctgcctcggcctgctgagtagctgggattacaggcacccaccatcacactcggctaatttttgtattttgggtagagatgggtttcaccatattggctaggctggtctcgaactcctgacctcaggtgatccgcccaactcagcctcccaaagtgctgggattacaggtgtgacccactatgcccagcccacaatttcttaaaataataaagaaacgaatacagatttgactgtatatgtgcgtgtgcatgtatgtgtacacatccacattccctagctgtatccactgagagggacacggaacagcctcatcctagtagcagtgagcacatgtagcatccagatcttgacttctaaataccattttcaaaaaaagagaaccaggatcttcagagaacagactgattccagggctgagaccaaaaaaaaaaaaaaaaaaaaaatacagatgctcctggaacagcttgtactagaaagctcaaagaatggtgggtcactgcaaaaggaaaagggcacagctgcgagcttgagtgggctcccactggccaaactgggaattttttttttttttttgatacagagtctcactctgtcacccaggctggagtgcagtggcacgatcttagctcactgcaacctccgcttcccaggttcaagcaattcttgtgcctcagcctcccaagtagctgggactacaggtgtgtgccaccacacctggttaatttttgtatttttagtagagatggggtctcaccatgttagccaggctggtctcgaactcctgacctcaagtgatccacccgcctcagcctcccaaagtgctgggattacatacatgagccactacacccggactgggaataatttaattattacagtgaatagtgagagtcatggattataacctattgcattcacgagtccatgcagacatagataaatcacttgccaaagatcacaatgggataagatagcactggggacgagggacgctcactctcattttcctttagcacttctttccccccagatactgtaagtgggaaggacatgacacatagagcaagctggaggcccaggaaattcctagagagagtgtccaggacatatggacttttgagatctgtccagtgtcatttcctgtttcaaatcatgctgggggaagggaaggtgcaggaggtgcagtgagggagggggcgtaggggtgagagaggccggagagcagggaggaggctggtccatcagctgcagctgccaatgatgcctgctggggggtgtatgggcgagggacctcctggagagcgaggtgcccacatctggttcacattgaagggtaaaaacaaacaggtttgtgagctggaagaagcccagtggactgagccaagccgtgctgcttggacactagggcacagcatcccctcttccacgggtcactgggcctggccagctcccaagggcttgcagaggggacgcggttggaataaggccatcttctctgcttggaaccacattatctgggtccagctcctcctaatgtacaaaccggcctcatcgtgtgtccggagaggctggttctttgatttgtagatgactcatttcaggctcttgaacgagactgagactgcacatgtaccaaatgtcaccatgtccacccagagggcttgtttgtgcttcgtgtaatgtctcccttggctaggaagagacaacggcttgctgtgggatctggagcaactttcttaacttctatgagcctcagtttccccaggtataaaatggaaacaacagttcctccttaaggggtcatggttggcctattagagttactgagtatcgggcccagccgcagtgccaaaaatctctcaatcaacgtccaccattcctactggtcatttggactccagccttatctcttctactgggtatctaaagttagcctgtagtcccagctacttgggaggctgaggtaggaggatcacttgaactcgggaggcagaggttgcagtgagtcaagatcatgtcactgcactccagcctgggtgacagagtgagactctgtctcaaaaaaaaaaaaaaaagttttaggaaaaaaagactttcctctaggccaggcaggcatggtggctcacacctgtaatcccagcagtttgggaggctgaggcaggtggatcccctggacaatatagtgagacccaatatctgcaaaaaaaaaaaaaattaaaaattagctgagcatggtggcacacgcctgtagtcccagctatatgggaggctgaggcaggaggatcacttgagcccaggaggcaaaggttgcagtgagctgtgatggcgccattgcacttcagcctgggtgacagagtgagaccctgcctcaaaaataaataaataagtaaataaataaggccaggcacagtggctcatgcctgtaatcccagcactttgggaggccgaggcaggcagatcacttgaggtcaggagtttgagaccagcctggccaacagggccagaccctgtctctactaaaaatacaacaattagcctggtgtggtggctcatgcctgtaatcccagctactcagaggctgaggcaggagaattgcttgaatctgggaggcggaggttgcagtgagccaagattatgccactgcactccagcctgggctacagagcgagactttgcctcataaataaataaatcggcagcagacagcagggagctgattcattctggagagagccctgaggcccgtgtcctggccagcaccttttagagacctcagcttcctaccctaaactcacctcttgctgtccccaaacttacagaaaaggatgttgtccctttgccagatgcaatcagtttgcgctcctccagcaccctccagggtgttcctggggagtccgcttctgtgggcccacttgtcagctgtcaaaagcccttggccggccgggcttggtggctcacgcctgtaatcccagcactttgggaggctgaggtgggcggatcacaaggtcaggagttggagaccagcctggccaatatggtgaaaccccgtgtctactaaaaatacaaaaactggccaggcaaggtggcgggcgcctgtaatcccagctacttgggaggctgaggcaggagaattgcttgaacctgggaggcggaggttgcagtgagccaagatcacgccactgcactccagcctgggcgacagagggagactctgtctaaaaacaacaacaacaacaacaacaacaacaacaacaacaacaacaaaagcctttgtccaggagccactgcaaagcacaagcccgggacaccatccaccttggtccttgggagaaggtgaaattagacaaactggttacaccttggcaaatcatttgacctcattgtgcctcagttttctcctctgtgaaaagaacttttttttttgagatggagtttcgctcttgttgcccaggctggagtgcaatggcacggtctcagctcactgcaacctctgcctcccagattcaagtgattctcctgcctcggctccctagtagctgggattacaggagcccgccaccacgcccagctaattttttgtattttttgtagagacagagttttactatgttggccaggctggtctagaactcctgacctcaggcgatccacccacctcagcctcccaaagtgctgggattacacacgtgagccacctcgcccggcttaaaaacgacttctaaatactactcactttatagggttgtaatgaggctatcctgagaggtttgagtatgcatgaggcatatttggtacagtgccttgcatatagtaattgctcagtaagtgctcactattatggttgttagctgtcattcaagatgtctccagccccaaataatcctcactgaacagttcagaagttgccagggctcaagctcaagtctgatttcctagggctactggggaacagacagaatccttcatgcggtttctttttttttctttctttcttttttctttttttttgagacacagtctcacactgttgcccaggctgaagtgcagtggcacgatcttggctcactgcaacctctgcctcctggattcaagtgattctcatgcttcagcctcctgagtagctagggttacagtcccacaccaccatacatggctaatttttatattcttagtagagatggggttttgccatgtagaccaggctggtctcgaattcctgacctcaagtggtatacccacctcggcctcccaaagtgctggaattacaggcgtgagccaccacacccagccccttcatgcagtttctctcactcctttcagaaacaaggagtctgatattccatcaacatggaatccactgctataaaccagcctgcagtcccagccggtgaactacaatccaatcagggattaaatctaaattcctcccatctgatcactgggatccctacacatccaactgaccccctccccctccagaaatgttatcaatcccctaaatgcctccaatcaccagtttaaccaccagccaagagcttactactccccctctcccaagcttagacactcagtgtaattaatggacacgcaacattgggagctttcacattaagctcttactttgaaactttgaataagaaaaagctgaaaaaagcagatctcccaatctcggtgaaattgtaggtaaaactccaagtagaatacccaaaataaattgtataagtaatgataatatatcataatgtatttattatatgcatatatattagatatatttagaatatataggtattaagtattctaaatttctatcacctatctatctatctccatctgtctatctatagtcactgcaaaggctaaaaggaagttttccacactcaagagtgaaatggggctgggctcagtggctcatgcctgtaatcccaacactttgggaggctgaggcaggaggattgcttgaggccagaagttcaaaaccaagaccagcctggacaacataatgagacactgtctctacaaaaaatataaaaattagccagctatggtggtgcacacctgtagtcccagctacttgggaggctgaggtgggaggattgctgaggacaggaggtggaggctgtagtaaaccatgattgcttcactgcactccagcctgggtaacaaactgagaacttgtctcaaaaaaaaaaaaaaaaaaaaaaaaaaaagagagagagagtgaaatggaacaaattatacatcctttgcatgacaagaaagagctagaagaataacattgtggagggcctggtttctctgaaggagctgttgaaatctgctctatgatcagaagggacatgattgtaggtggaggctggaaaaaggctgtttaagcaactgtttagattttgggttaaaccattttgcgcagcttgaaaaatagtatgctctcaaaaaaaatctatttatccaacagctatctatctatttatctatctatctctctatctatctgaaatgaaattagttgcccctttcaactcctgctttgtaaaataacactgactgagagcttacttgttgagctgggtattcaaatcacctttaaagcacctctaggagttagacactagttttatcttcattttgctgagttggaaagtgaggcacagagcagttaagcaacttgctggaggtcacacagctattaggtgtcagagctggattgaaattcaaatctgattccagagccaacgctatttgccactaagctctactgcctccctgtggcggttttccagtcaggagggagtcttcagctttcacaaatactatacctccctcgcccacaacacacggaactcagtctccccctgttgcttttcatagcaaatcctatgccctctgttcatgtttttgacatgcataaaatcttggcccaccatgagaaaaaaaatactttgttgatgtgtgtgtttgttttaaccagtaacttccactttctgtctttctaaaccattagaatgaaaaacatttgttctcacccttcctatgtttttgtttgtgtttgtttgtggagatggagttttacttttattgcccaggctggagtgcaatggcatgatctcggctcaccgcaacctctgcctcccgggctcaagcgattctcctgcctcagcctcccgagtagctgagattacagtcatgcaccaccatgcccggctaattttgtatttttagtagagaggggtttctccatgttggccaggctggtctcgaactcccgacctcaggtgatctgcccacctcggcatcccaaagtgttggaattacaggagtgagccaccgtgcccggccctcacccttcctatgtaaaaccaaaagcattcactcactgtccatccacagcacagattggaagccacttaggcaccccgggggttgaatctagtgaagagaatctgacgatgcctggtgcactctggggtgaattcattttgacacgtagctctgaagttttagaaatatcgttgttcttcatattggtgttttagatagaggaggcatgttagttttatttttcttttttttgagacagagtctcactatatcacccaggctggagtccagtggtgcaatctcagctcactgcagccttgacctccctggctcaagtgatcctcccacctcagcctcccaagtagctgggactacaggtgcacaccaccacgcctggctaatttttgtattttgtagagacggggttttgtcatgttgcccaggctggtcttgaactcctagactcaagcaatcctcctgctttggcctctcaaagtgctgggattacaggagtaagccaccacacccggccgaaatgttctatgtctttatctggatagtggttacctgggtgtccatgtaggtaaaaatgcattgagtggctgggcacagtggctcactcctataatcccagcactttgggagactgaggccacttgagtccaggagtttgagaccagcgtgagcaatatgactaaaccccatctctactaaaaatacaaaaattagctgggcactgtgacttgggcctataattccagatactcaggaggctgaggcatgagaatcacttgaagctgggaggcggaggttgcagtgagccaagattgcaccactgaactccagcctggatgacagagtgagaccctgtctaaaaaaagaagcattgagcagcacacttcagattagagcagttcacactcattactgaatacaaattgcaccttaaagccagctgcagtgtctcacgcctgtaatctcaacactttgggaagccaaggcgggcggatcatctgaggtcaggagtttgagaccagcctggccaacatggcaaaaccctgtctctactaaaaatgcaaaaattagccagccatggtggcaggcgcctgtactcccagctacttgggaggctgaggcaggagaatcccttgaacctgggaagtggaggttgcagtgtgctgatatcgcgccactgcactccaatgtgggtgagagagcgagactcgtctcaaaaaaaaaaattaaataagttgtaccttaataaaataaagacaatagaaagggaggaatctaggagaattattattttaagggcgaacaaagttcataaaacaaacacacacacacacacaccctgtggtggttgtgaggactggtgtgggacaacagaggaagagaaggcagggagactagagttaaagactattgcttgttgtccacgttttaatctcttaggcagaaaagggcaaagacatgcccttttcattgtcaccagctttactttcaccttttaaaagtaaattgttggctaggtgcagtggcttacgcctgtaatcccagcattttgggaggctgaggcgggtggatcacctgaggtcaggagttcaagaccagactggccaacatggtgaaaccccatctctactaaaaatacaaaaatcagccaggcctggtggcacacacctgtcagctactcaggaggctgaggcacaagagaatcacttgaacccgggaggcagaggttgcaatgagctgagattgcaacactgcactccagcctgggcaacagagtgagactttgtctctcaacaacaacaaaaagtaaattggatcggagtgcagtgactcacacctgtaatcccaacactttgggaggctgagactgggggattgcttgaggagtctccctggctgaagtgaaggtttcccaggctttctcatgagagaatgtcttttaagtttacaaaaggaaaggctgaaattaaattccctggtatctttccattggctgaatttccctgtagctgcctcttgctgaagcctggggtctccctggcagctgggcccggaggaggcaggaagtaaatagctgttctctgaatgggctcttcagagaaacgggacgcctcactgtattcactgcgaggaacacaggacctcaaagctctggggcccaactgggaactacacaagtggtttcttttccagaaagcccactcataagacgcagaggcatccaatttcccaggaacctatggcacagtgagaggcatgtcttcgtcacccagaagctcaggacaatgtcatcacccacagaggcatcgatgggagggctgagctcaggaacccacaagaggctcagggtgctgccatgagcttagatcctagacttgagtgggctgaaaggtcacaaggctaagatttagggctaacacagaggagacaagccaacgctgagtcactttgaagcttgaaatcaggggttttaacccccacgctattgacatcttagaccagaaaattatttattgtggggctgttctgtgcattatggggtgtttagccgcatccctggtcactatccactagatgacagtagcatcctcctccccgagaagtgacaaccaaaaatgtctccaggccaggcgcggtggctcacgcctgtaatcccagcactttgggaggctaaggtgggcagatcatctgaggccaggagttcaagaccagcctggccaacatggagaaaccccatctctactaaaaatacaaaaattagccagacgtggtagcaggtgcctgtaatcccagctactcaggaggctgaggcaggagaatcgcttgaacccacgaggtggaggttgcagtgagctgagaccatgccattgcactccagcgtgggcaacaagagtgaaactccatctcaaaaaaaaaaaaaatgtctccagatttttgtcaaatgtcatcttggggggcaatatctccctcgattgagaaccactgctttaggtaaaagcaaaatcttaggctgggcgcaatggctcacacctgtaatcccagtactttgggaggctgaagcgggtggatcatttgaggtcaggagttcgagaccagccagaccaacatggtgaaaccctgactctactaaaaatacaaaattagctgggtgtggtggcgcacgcctgtaatcccagcaacttgggaggctgaggcaggagaatcacttgaacctgggaggtggaggttgcagtgagctgagatcgcaccattgcacccagcttgggcatcaaaagtgaaactccatctcaaaacaaagcaaaatcttagacttttggggctattgcctgaaatcttggacaaaggcctaactgacccagttaaaatactgagttaaaatctgagccccactgttagactaaagcaaaccaaggaggcaatgaattacgtgttgcctaacttgcttctcccttgcagtttcaattgcgttaggcagccagcttcccttcctctccactgtttgaattgttgctgtgccgggcaaaaactgtggctggtccacctcagagctggcctcatttcaataacagccgggaggactggcatggggctttccaagcttaattagctcatgtttgtaaagttcttaggaagctcaggccagcatgctatgggaagtccaagttactaggattctcgccacacttaaaaaaagaacattcccacataaaaaggctggtagaggcagaaaagagtgcctcagagcatgtgtgtgaatagcaaagggtccttctgaaccacatttgagaccgtaaagaaagagggtaatgcattccaactttcaggccctcctcctattctctagagcaggaaattatttaaagtatttcctgaacagctgaagtatgttagaaacctgctagcatcctccacagaatctccaggaaatggacaccaaagaatttctttgcaacaagaaactatttgagctctactggccatttctacctgaacaggttggatactctcagcctgggacctagagaatacaatcttcttagatcatttttatgtcaaacttagcatcctacagcaagaacacacactggaagagaattcctcttgtgtatgcacatatatatgaagaattctcttctagcatatgtatatatatatatatagagagagagagagtatatatacacatatattagtatacatcaagagagacggagacagaaagaatgaagaactttctttgttaggtaatttagcaatgtcagtaatagcttgctagttagttattcccgctcaatcttcgggtggggcaagaatgaggtcagcctcttctgttttaggcagaattctagaacatgtaacaaaaggaaactgcttggctccatcccacctctagagatttgttctctccaaggcctgcctataaatctcccagggtggggttccagaagcatggtgccccggcaagccaagtttgaacctcccaagcaaatcagcattggaatgttggtggtgtcacaggatcaagagccatctggaagccagctgtgacttgggctgattcccatggtttcctatgagaagggcaagtatgatcactacagcagaaataccaaagaaaaatggcaattgttacctctggagcaaagaacaaggcctagagcagagccagttcctaaagagaatgacagatctgataatgctggtgaaggccaggcaagttctgtgcttcctaaccagttagaagcctttcctccggcggcggcagagctcggatccagagtttgggaagtgtgggacttgcctctctgagacctggctgtcagcaggaggatgaggagccaaacatgtcccattgttaccacccaccctctggggcttgcagggaaactgaactcctggccaaacgagaaatataaacccttgccatcttctctttccgaggacaaaggcaccacagatttttagtgtgtttcatcatgcttttggaatgaatgtcaaccaaatgccatcttttagggacagtggcaaaaacgcctgtccaactggagttctttagtcaatggcagttacagtcactgatctgaggtcttaaactacctattaggctcagggagtgacattaaaaaaaaaacagcagccgggcgcggtggctcatgcctgtaatcccagcactttgggaggctgcagtgggtggatcacaaggtcaggagttcgagaccagcctggccaacattgtgaaaccccatctctaaaaatacaaaaattagctcgacccggtggtgcatgcctgtaatcccagctactcaggaggctgaggcaggagaataacttgaacctgggaggtggagtttccaatgagccaagattgcgccattgccctccagcctgggcaacaagagcaagactccgtcaaaaaaaaaaaaagaaaagaaaagaaaaaagcaaaaagcatatttacaaatgtgtagaaaataggctgggcgtggtggctcacatctgtaatcccagcactttgggaggccgaggtaggtggatcacctgaggtcaggagttcaagaccagcctggccaatatggtgaaactccatctttactaaaaatacaaaaattagctgggcatggtggcgggtacctgtaatcctagctactcgggaggctgaggtgggagaattgcttgaacctgggagacggaggttgcagtgagccaagatttcgccactgcactccagcctgggcgacagagtgagactttgtctcaaaagaaacaaaaaaagaaaaacaaaacaagaaaaagaaaagaaatggaaaggaactacacctgaaactcataatattttgaaggtagctctgcctttgagggcctaattttccccaggctgtgatcccctttctttgaaaagcacccacatgtatttaacagtaaactgtgcatacagtttcagaggttcaggagccccataacctatcttggatctcaggttacacaggttaagaattcttattcaggccaaaatataaaatccaatggtagaattttaggttattattttaattgttttaggttattattttaatctttgtggtattctgtttttcaaattttctaaaataagtattatttctgtaactaccaaaaatacattttaaagaattaccagaaagaaaagaaagagaaaaggaagaaaaaaagagaaaggaaggaaggaaggagagaggaagggagggagggagggaggagagagagagagggagagaaaaaagagagtgagagagagaaagaaggaagcgaaggaaggaaggagagaggaagggagggagggagggaggagagagagagagggagagaaaaaagaaagagagagagaaagaaggaaaggaaggaaggaaggaaggaagaaagaaagaaagaaagaaagaaagaaagaaagaaagaaagaaaaagaaagaaaggaaggaaaatgaattagctttgtgttccctaagttaatctttgctgagtggttgagacgttggttgaaagaatgggcaagaacagagtagggtgacagtcattggtcacttacaactttagtctaagccaaagggttgaaaaagaccatcttggctgggcgtggtggctcatgcctgtaatcccagcactttgggaggcccaggtgggtggatcacttgaggtcaggagtttgagaccagcctgaccaacatagagaaacccggtctctactaaaaatacaaaattagcctggtgtggtggcgcatgcctgaaatcctggctacttgggaggctgaggcaggagaatctcctgaacctgggaggcggaggttgcaatgagccaagatcatgccattacaccccagcctgggcaacaagagtggaactctgtctcaaaaaaaaaaaaaaaaagaaagaaaaagaccacctcatttatacacagttttctacatttctcctatatttcaatagttttgcttttaaaatatgtattttttgcagccacaatcaggagatgccttctgggtatcataccttgaccattaattttaattttgaattgatttaaagttttcttattcatccaatctttcctcatattcccttgtttttatggataagcttccaatatttctgcctaaacttgttcaagttctaaacatgagtttcttcatagtagaaaatatggctttgtggtggctgtctcaacagtcaagtgtttgctcattcaagaaacttcattaacactagtattagggccctatcaggtattgatactgacaagcttccatcaccaagttggacttgggtggttcagtcctgttctcatggccaatgagaagttaggtgaggaggtgctccaattagtctgtccaatagaattaagagaaagggaaccagtgggcacaagaagacagctggacctctcactgggatactgcaaaggctaacagccagtctaggaacttagtcacagtgggctctccttgagccagttccactgttcagagagctatgccaagcccgtaaaagacctaaaggctgacaaaacatctgacttttcagtagaatcccatcattaagtatgtaaacaatccagtatggtcatcttatgttgatgtgtatctgattgataaggggaaaaaaaagaagagtaataatcaacttagactagaaggtaaaatatatcaaaacaagagtctatgtaagaacaaacagaaatctttggtgttaaaaggttggaggcagccaggtgcagtggctcattcctgcaaatcccagcactttgggaagctgaggcaggaggatagcttgaggccaggaatttgagaccagcctgggcaacacagcgaaactttgtttcttcagttattacagctattcccaacaacaaaaagtttggaatagccgtaatactcatctaggatatttctattatgtaggaattagtatctatacttttcttatgccagcactgagctgccccatcaaaaggtctttcactgacataataaagaggcaggatttgaattcagacagatctggctcttaaataccagtccacttcactgcaccatgctacctcccacaactaggatgggaaaagacatttacgattgtgaaaagcctggaacgcacgaactgatcagtttaagagggttcgatgcatacacctcccacacagtgttatgaaactgtcccaaatatttaggaagaactgagcgttcacagacactagaattagctttcaaactatgccaacatgtcgtttaacatgcaagtgctcaaaattaaattgcacttctgccctcagaaaaccctagttgatagcttgggtgtttcttatcatctttattagctggggttatgaaacttaaatgggtgatgttgctaaaacacttttctctaacactttcccatggggagttagaggcaggctgcatgatttggccgggttttgttcatcacaaattaggtcaacatcccaatcccaaaagaaatcaccattagtgaaatgacatgtttcaagggctttccaaaatcagtccaccgggttttggcaagctccagcaagggtggagaggggtaaggggcagccaggccttaatggccttctgaagttgggtcctgtatctgacaaggtttccaatggctcctatgaacaaaactgactttgctcttactgcttttatgcaattaaagaggccaaatgctgaaataaaaatctcacttaacaatgaggatttacagtaatgaaaaaattatcccgagttttttcttcagtgatgatgcagtgacagaaagattgaggatgagaggggaaaaaatcaacattaggaaacagaatgttgatttcctttgtcctaaaaatgcaatatagcaatgaaagaatcaatactttattaaatgtttaacactgatgtccaatcttttaaagttacccttttaagattatttcaacaagcaaaataagtcttagcagtttttactttgataattgccaaatgatattaggaatattacctttcctcccttgcttacaacaaaaacaaatacaaaaatgaaagttataggtaaagatatataatttatcaaagtgtttttttgttgttgttttttttgtttttttgagacggagtcttgctcttgtcacccaggctgaagtgcagtggcacaatctcggctcagtgcaacatccaactcctgccaccacgcccagttaattttttgtatttttagtagagacagggttttgccatattgggcaggctggtcttgaactcctgacctcagatgatctgcctgcctcagcctcccaaagtgctgggattacaagcgtgagccaccgtgcccagcctatcaaagactttttttcccctatttttgtttaatttatttaagaccacctccctacaatttccagagaaaaaatacaaaacaagaaacagacttggtttcaaatacataaccaggtgctggagtttaaagcattactgataacattgttacagaagaatggcagcttactgcaggacacttcagtattcctgaggaataaacatgatttctcttgtcctcccactgggacgttctcaggtgaagtcactgctcctgctctttgacatattttccatgtagaagatatggagcctggaaatcatgctgacagttggagtaagccattcctaatcccatgccagaactgaaggctaatggccacattcttcttttaaagaagtgagaaaacaattcctaatccaaaaccagtacctgtcttcaccaccgcatctgccaggcactggtcccacttcctgctgagctccaattccaacatgttccccacccatgcctctagctctcctctccgccagcccctgcactctttaacactaccaaagtcttaaatgacatttcaaactgctagatggccgggcacagtggctcacacctgtaatcccagcactttgggaggccaagctgggtagatcacttgaggtcaggagttcgagatcagcctggccaacatggctaaaccccatctctaataaaaatacaaaaattagtctggtgtggtggtgggcacttgtaatccccgttattcgggaggctgaggcaggagaattgcttaagccgggaggtggaggttgcagtgagccgagattgcgccactgcactccagcctgggagacagagtgagattccgtctcaaaaaaataaaaataaaaattagccaagtgtggtggcgggagcctgtagtcctagctactcgggaggctgaggcaggagaatctcttgagcccgggaggcagaggttgtggtgagccaagatcgcgccactgaactccatccagcctgggcaacaagagcgagactccatctccaaaaaaaaaaaaaaaaaaaaaaaaagctttcaaactgctaggaaactaaaaatgttggtacattaataaatcactagcagtttagacattaacactgcaagagggagaagttggtggctacacaatgtttttatcgtgacttttacaaatcaagctggttataaagtcattctgtcattctcaaagatattaagttacccacagataaattaaataaaaatctcccaatgcctctacggatctaaccactccaaggaaactagcatgttaagcattttatctaagatatgaaaaaaaaaacttttttggaaaccagctatctcctgttcattacctcactattgagtcatgcttcctttaacaaatccagaccttacgctttctatcctgtcttttacactagtctttctgaagccattaaaactctcccatgttaaagcaaaaatctaggatgtccaggtttacttccccatcaccttttctcaagctgaagacttttggattcagtatccaagaagggactcgagttggggagaggaagagaggagcaagtaagtaggaaaggaagggcagtctgtactgttaatgtctcttccccctcccctttatgggagcctttgtacaggaaaagctgagaaagtgatccacggttccaaacaaaatgctctatgcttacgaggaccacgtgtaacacaggggtttagtgttccattttattttttgttgttgtttgtgtgtgtgtgtgtttgagacagtcttgctctgtcgcccaggctggagtgaaatggcgcaatctcagttcactgcaacctccgccgcccaggttcaagttattcttctgcctcagcctcccaagtagcttacaggcgcccactagcgcatccggctaatttttgttttttgtgtttttttttaagtagagacggggtttcaccatgttggccaggctggtctcaaactcctgacctcgagtgatctgcctgcctcggcctcccaaagtgctgggatctggccaagatggtgaaaccccgtctctactaaaaatacaaaaatgagtcgggcgtggtggcaggcgcctgtaatcccagctacttgggaggctgaggcagagaatcgcttaaacctgggaggcagaggttgcagtgagctgagatcgtgccactgcactccagcctgggtgacagagcgagactccatctcaaaaagaatagtggtgatcaatctatattgtacaagagcccttgggaattacatttttaaaaaagacacaaggtggaccctcatgcccctcatcaacgaaacagaactgggtacattcccaggtgaggcccacgtgcagccatgattttaccttggaatcccattcagccttgaagtttgggaggaatgaattccacttgtagctccaggagagatttatgattaaatttacagtgtttagcgcatctccctggccaaggagacttaaggagacactggctgagggtttctggaaaattttattcattcttctgtaaaaactgcagccaggactacctctggttaatcccatcagtttggacgggttacctttcactagcaacattaaagaccccaaattagaaagcaacacataggcatggtgaagtcaagaaaagggtggacttgaatgtttatttacaggatgctgcaagataggaaattccacatagaaattagaaacctagtcagaggacaagcttcatacagtatgtacagttggaactgttcaagtatagtttcagtgtaaaaagtgctacaataacaaaccacatttaagaaagagttcttagtagagaaacaataagacaaaataccaaacatagtacacaacaaatttatgcctcagctacatgatctaaaagttaaaggtcccaggagccccatcctgaacttggaaagtgtagccttcagaggtagtttctggcacaacgttttgatcttcctcttcctggaaatatattaaaaaataagtataaaaataataagtattccaagcagcagcctacctgaagtctgtatttaatctctaggtcttgatctgcatattacacctttaatcctgtatggtattgtagtatctgacataggggagggagggtctctgaaactttgccaattcataagtgctagctactacagtaacagaaacaggccgagattttttttcttccccaaccgtcacttttcaataggaaaagactgtattaggcccagagcatggtggtgggtttggcctacttctctatcacctcctacaatgacacccgttaacttaccctcaagatattctaagattctcaaggctgttcatttgaaactaatctggtgacttttaaaatctcacctcaacgccaagaccaaggtgcgagggcttattgagatcatctccaatgcagcagggtacgagaatatccccatccagcaccatgaagaaaacttcctgaggcagttggctcagaaggtccctgacaagctgaataaccctaagttcaatgatccgcacatcaagaccaacctgctcctgcaggctcacctgtcccgcatgcagctgagtgctgagttgcagtcagatacggaggaaatccttagtaaggcagtccggctcgtccaggcctgcgtggatgtcctctccagcaatgggtggctcagctctgctctggcagctatggaattggcccagatggtcacccaagccatgtggtccaaggactcatacctgaagcagctgccacacttcatctctgagcatatcaaacgttgcacagacaagggagtgaagagtgttttcgacatcatggagatggaggatgaagaacggaacacaattcttcagctgactgacagccagattacagatgtggctcgcttttgtaactgctaccctaatatcgaactatcttaggaggtggtggataaggacagcatccgcagtggcgggccagcggtggtgctggtgcagctggagcgagaggaggaagtcacaggccctgtcattgcgcctctcttcccgcagaaacgtgaagagggctggtgggtggtgattggagacaccaagtccaatagcctcatctccatcaagaggctgatcctgcagcagaaggccaaggtgaagttggactttgtggctccagccactggtgcccacaactacactctatacttcatgagtgatgcttacatgggatgtgaccaggagtacaaattcagcatggatgtgaaagaagccgagacggacagtgattcagattgagtcctgaggcatttactcttgggtaaaggagagttgagcctgaattaggaatgtgtatattgtagggatcctggtggttatggggaccacgtctgtgggcctgaggtctggccagccagggctggtgctgtccctgcccacatccacttccttttcccttgttcacactctggatccagtgacagcaggtgtcacgggtcaagcataaatcatatatagcatgttcaggcatgttactggtagttccttttgagtctgacattctaataaaataatttgtagaaaccaaagctaaataaataaataaatagattttattaccatcaagccaaacatcagaggggcaataagtacattacgtcctatgcacactgatattttactatatttaacaaagatatgaggctcatttttaaaagtatgagggaaaaaagggctcatggccttggctttacatttttccaagttgttattaatattaccatccattactcacctctacagagaaatacttctcagttaagcttaatgaagccttatatacagactcattttcatggttttgtagagcttcaattttgtctacgcctccacattcttcaatcattatactaagtttctcagtttcacctagtttctcagcagcctaaaaaaaaaaaaaaaatccaagtttactggcgtatactctgaatgttttaatgaagaaaacatcgaaaatttgaatattgatatgtcaggcagaaataagcaccttaacagttccttcatcaagcctatcatagttttatgtccattctatattttgttgaaactcagtgtgattggatctgtacctactcttagcagtacttcgactggagccagagatcttacaatcagtagctctcaaccttttgtatgtatcaaaatcacatgggccacttttttttctttttttctgttttcttttttttttgagatggagtctcgctctgttgcccaggctggagtgcaatggcgtgaagtcggctcactgcaagctccgcctcccgggttcatgccattctcctgcctcagcctcccaagtagctggatctataggcacgtgccaccacgcccggctaattttttgtatttttagtagagacggggtttcaccgtgttagccaggatggtctcgatctcctgacctcgtgatccgcctgcctcagcctcccaaagtgctgggattacaggcatgagccaccgcgcctggccaacgtgggcaacttttaaaacaacactacactccagttcaactggtctgctatgggaacaggggcgtattgtttcgtaaagcatcctatatcatcacaaggtgtagtcaaggtgtctaagggcaaagatggcctatggagtgctaaactaaatgtctccgaacagaatgtgtgttggtattaaggatttacggggcacatggaatggtatgtaggttagtttttctttaaattttcaacttttaagagatacataaatatctatagatgaaataacagatttgcttcaaaataacttaggggattagatgaaggaaagaagaaatactggccacatactgacaaattatttatacacagtgacagatacaccagcatccattattgtaggctcaattttttttttttttttgagacagtttcactcttgtcacccaggctggagtgcaatggcgtgatcttggctcactgcaacctccgcctcccaggttcaagcaattctcctgcctcagcctcctgagtagctggaattacaggcgcctgccaccacgcccagctaatttttttaatttttagtagagacgggggtctcattatgttggccaggctggtcttgaactcctgacctcatgatccacccgcctcggcctcctcaaagtgctgggattacaggcgtgagccaacatgcccagcctgtaggctcaacttctatatgtaaaaatttctagaatccaaagttgatgagaagggcttacctaccaccaatcactacggcaaagtgccatatgctggtatgcttggatcagttaggggtggaaccagaagaaaaatataattaagtcattcaaaaaaaatttttttttgagacagagtttcactctttcgcccaggctggagtgaagtgacgcaatcttggctcactgcaacctctgccccccacccagagttcaagcgattctcctgcctcagcctcccaagtagctgggattataggcgtctgccaccaggcctggctaatttttgtatttttagtagagatagggtttcaccatgttggccaggctggtctcgaactcctgacctcaggtggtccactcacctcagcctcccaaagtgctaggattacaggcatgagccactgtgcccggccaagtcattcaaatttaatgtcaccaaaattcggtatgaaattgggaaattaaatcaaccaagtaaacaggtgtgatgagtccacataagcgcctgactccgattcagttcgcaccatccacttgtcatctcttttatatcttttataatgcctgccacatttttaatcaaaggggtggccacataaacaggctttctgattctgtggcttactagtgagtaaacttacagctgccctcccccaagtctaaatagtaaaccaattattatcaagtccaaattcaaacaaagccaccttgataggacttacctgaaagatatttgaaatggcatccaggataaccagaataatcttggtatcttttgcaggtaagaggttcatcaacggttctattatgccacagtgaacaaggtacacaatctgttcaactgttccacggcccatacagcttccttttgtgtctcaaaatctgccaattaaacataaggaaatggttttatttcagaacagttgcacaaataagattccaagagtactttttcacaaaaacggtgactgaaagtaccaaggttctattgatacaaccttaagtaaaggggttactgggtattgttcagcaaaggactcctagtagaacccaagattcttgcacatgaagaagcttatcaagcacagctttctataaatactaaaaatgacttgattaaatcctaagacttcgttaccttagagagatcgctgacaaggaatgggactaatccatgattcacaacttgctgtatctggtcctggcggctggctgtgatgtttgacattgtccacgtagcttccttctgaatgttagttttggggttggtgagcaggctgggaaagacggcgagtgctcctgcatcaatcacaacctgagtctgttcatctgtaccagtgacgatattccctatggctcttagggcaggagtctgaaaaggaaaaaatgttgatgctggttaccttatatttttctcagcacttcagaaattctgtactccaaaagttttaacaagaggcccaacatgacctgaaataggcaatatttcaatattggtatcaactgattatgcttttttttttgagacaggagtcttgctcttgtcacccaggctggagtgcaatggcgtgatcttgggtcactgcaacctccgcctcccaggttcaagcaattctcctgcctcggcttcccgagtagctgggattaaagcgtgtgccaccatgtccggctaatttctttgtatttttagtagagatgggttttcacatgttggccaggctggtctcgaactccttacctcagctgatccacccgcctcggcctcccaaagtgctgggattacaggcatgagctactaaaaatttagacctacatttaattttgcctgttaaacattcattattttatatgtagaacagtttccaaactcgatgtcaggactcactggagtctcaagttatggagtatccaagtgtttcgttgctaaaaaaggcagctttgaataatttaaaaaatgaactagaaggccaggcacagtggctcacacctgtaatcctagcactttgggaggctcaggagggaggatgggttgagctcaggagttcgagaccagtctgagcaacataatgagacctccccttctacaaaaaattaaaacaaaacaaaacaaaaatccaggcatggtggtgtgtgcctatcaccatgcaagaccttctctcaaaaaaaaaagaatcagagcagactgaagattattcctacattaatctcaataacttgcattcagatatactttgagggagaaagacatgaagttataagcaacattctgagaattttgatatctaattttataatctatatatttccatggttgagtgttgttgcaaatataaatgggttatgtgcggccaggtgcagtggctcacgcctgtaatcccagcactttgggaggccgaggcggtggatcacctgaggtcagacgttcgagaccagactgagaaacatggtgaaaccccatctctactaaaaatgcaaaaattagccagacgtggtggcgggcccctgtaatcccagctactcgggaggatgtggcaggagaatcgcttgaatccaggaggcagaggctgcagtgagcctagatcgcaccactgcactccagcctgggcaaaagagcaagacctgtgccctgcccccccaacaacaaaaaaatgttttatgttgtgaatcaaagtagaaaggaggtttgagagccaatgctacccataattcaaaaagccagtatccctgtctctccaggagcttgacacctaacagaaaatgtgacaagtagacaaacagcataaaacaagtggtaaatagatgggttacatagcatttactcccaattttgggtgcagaatcagggcgctagagaatcctgagaaaggagtgtctttcctacgaggctaaggagtgctataagaagaagatgagctttgagtattagtaccctagaaatagaacacacgtagtagtcaattggaaaaaaaaaaaagataaatgtggagtgctaaagggctaaaggaagcataacgtggctgggtgcagtggctcacacctgtaattgcagcactttgggaggccgaggcgggcagattacctgacgtcaggagtttgaaaccagactggccaacgtggtgaaaccctgtctctactaaaaaaaaacaaaaattagttgggcgtggtggcggcacctgtaatcccagctattcgggaggttgaggcacgagtatcacttgaatccaggaggcagaggttacagtgagccaagatggcgccattgcactccagccttggcaacagcacgagactttgtctcaaaaaaaaaaaggaagcatattgtgagaaaaagaagtaggaaagtgcccagttatctttggaagatgaaagataaatttgaaaatctaagataggtctactttgtggaaggccttcatggagtatggattatattattattttttagacagagttttgcacttgttgcccaggctggagtgcaatggtgcgatggtgcgatcttggctcactgcaacctctgcctcccaggttcaagcgattctcctgcctcagcttcccaagtagctgggattacaggcacccaccaccaccccgagctaatttttttttatgtttagtagagacaggtttcaccatgttggccaggctggtctcaaactcctgacctcagattatccacccacctcagcctcccaaagtgctgggattacaggcgcaagccaccgtgcctggccagagtatggatttttatttttagagacagggtcttactctgtcatccagcatggagtgcagtggtacaatcatagctcactgcagcctcaaaatcctgggctcaagtgatccttctgcctcagcctcctgaatacctaggactaaaggcctgtgccaccatgcccagctaactttttattttttgtagagacaaggtcttgctatgttgcctagtctgggctcaaactcctggcctccagtgatcctcctatttcagcttcccaaagtgctggaattataggcgtgaaccatcatgcccagcggagtatggattttttatttttattttttttcttgagacagagtttcactcttgctgcgcaggctagagtgtaatggcaaggtcttggctcactgcaacctctgcctcacaggttcatgcaatttggagtatggattttaaggagagaaaaaacacgtctaaagcagtactttaggaaaaaattcagaaaaatagcatttggcacagaaagaaggaaacgataaattaggaggctactgtaaatatttcaggaggaaagacctgaacaaagctggtgacaaatacaaaaaaacacagaataccaaaaaagacagaaataaaccaaatgggctgggtgtggtggctcatgcctgtaatcccagcactttgggaggcccaggtgggtggataacaaggtcaggagtacaagaccagcctggccaacatggcgaaaccctggctctactaaaaatacaaaaattaaccaagcgtggtggtctgtacctgtaatcccagctactcgggaggctgaggcaggagaattgcttgaaactaggaggcgaaggttgcagtgagctgagattgtaccactacactccagcctgggcgacagagcaagactccatgtgggaaaaagcaaaaagaaataaaccagaaactggttggctctggacacactggtcaggtcaaggtacccagctagtagctagaaatgcagggaagtctgaaggaaggtcagagttaaaggaagatcctaaatcagcttcagtggattatggaaggcaggaaagaagataattagtaattgcaaacagagaaaaagatcttcacagatagttaaaaccataagactagaaatgttaagtttacttgaatttctaagaaaagtccctactgattttctggatttcatgtaactcataatctaaaatatatttttttacctggttgttgcagttttcctgcagcggagaagtagcatcatcaggaaatgagcttacatttctcctcttcagcatctggtcatccttcttagctttcctcagctccacattgacctctattctgtgacgcctcgtttccttgagaaaagataacatgctgtttcacctaccacatcagtttttgttgctaagtgaggacatttttaaaaagatccctaagttttcatccctttccaaatgtcttcccatttaaataacaccataagaaagcaacagaaggtactcactgtactgtcctttcccttgttcttagatctgtgaagatgggcagcttgtgtattagcattctcattggtggacatggttatgagacaaagggagaaagctaaaagatgggggaagagaaaaatatttcctttatcgttttcctttgtcaataatagtaccaaataagaactgaattatcaagcatctactgaatccacacctgtgcactagagggatatcatcatgttttcagcactatggaatagttttagccaacggataactgtcccccttccatctgaagggctgagacttcctagagcagggctgtccatcagaaatagaatgcaagctatataaattgaaacttcctagtagtcatttttgttttgttttgttttgagatggagtctcactctatcgcccaggctggagagcagtggtgcaatctcagctcactgcaacttctgcatcccagattcaagtgattctcctccctcagcctcccaagtagctgggactacaggcgtgtgccaccatacctggctaagttttgtatttttagtagagatggggttgcgccatgttggccaggtcggtctcaaactcctgacctcaggtgatccacccacctcggcctcccaaagtgctgggattataggcgtgagccaccacatgcagccaaaaaaaattcaaaattaaaaaaacccaataaataataatgaacttagacaaaaataccttcttggcatctaatgagatgatcaaaaggtttcctttctttaacttttttctttttgagagtgtcttgcgctgttgcccaggctagagtgcagtggtgcgatctcagctcattgcaacctctgcctcctgggttcaagcgattctcctgcctcagcctcctagcagctaggactacaggcatgtaccactgtgccccactaatttttgtatttttagtagagatggggtttcaccatgttggccaagctggtcttaaactcctgggctcaagtgatccactcgccttggcctcccaaagtgctgggattacaggcatgagccaccacatccagcctttctttgacttcctaaaatagtatggtattagtaatctcctagtattggagattggtgtctaaggtgaagccaattcagccatggtttcttattctttaaatttactcctgaatagatctgcataccaatattttgagatttcttatagacacacctatttgctattaattattaataataaatattaataaaggagacagggccataatttttaatttgtctatttctatttatcaagttttctaacagtttcacactaacagaaacaataatctgtaaaatttcctcctttttctattctggcagaaaagtttaaatggaactatctggttcccaaaatttaagaaaaaccttatgaaatcatttggtcctgccatcaccttaatgacaggtgcagtgataaacaaccagaaatccttttcctgcctaagagtgtggcttctgacctattaaggactgagatgactgtggcatccttctcaacccttccccccacccaaagggagctcggtgggtccctttctgtggctgtggggatggaaggtggggcacgatgagttggggccttctattccaccatcttgctccactccttctaggtggacccctttcattgtagatgtaggaaacctgaatactatgttagtagaccctgtgaaggctttaaaattccaagttctagtaaaagagaatcagaaatgttggttagtatgtctctttttttattcttgatattggttatttgtgctgtattatttcccccccttgataatcttatcagaggcttgtaaaacataatgggatctaaagtatgtttgttttctatttcatcacatttggtcatctttaatattttctttctttaggctggctccttgagatgtacccctagctaattaatttgcagtttttcttttctaacataagcattaaaggctagcaacttctcctaggaagtctttaactgcatctcacaaatttcaatatatgtagtactttcatgaacatccagatcaaaatgttttctggttttcattatgatttacatttgagcacttcttatttatttagaagtgtatttcttatgtttcaagcatatagcccttgcatttctttaaaattttacaaatgtctgtatccctaaacaatactgtaacattgtgttatcacacatgcttttaaacgctacacaaatgtatgtagtatatacatttatccttatgtatttttagtgatggaactgttttcttttttttttaatttttattttattttagattcaaggggtctatgtgcactgggggaaccgggtttctagttactcattacccgtagagtaaacactgtacccaacaggtaatttttcaacccttatgcccctcccagcctctccaaatgttttccttctattgtaaacttacgagattcaatctcgacacttgttgctctagtgtgtttttcactgctatgtaacagtccattatgaaatgatgacacaatttaaacatgcctgattatgagtacttaggaattgtttccaaatttcaccattatgaaataatattataaggaataccctgttacaatgtcttctcatgtacacagggtaaaagtttctctaccatatcgagaaggagtcaaattgcatttttaactttggttttgtcaaaccattctctaaaatgttatagcaaccattgtactaattgctctcgtatcagaaatgtatcacaactataatcccaacactttggtaggctgaggcaggcaggtcgcttgagcctagagtttgagaacagcctgggcaacataatgagacaccgtgtctacaaaaaatacaaaaactagccaggcatagtggaatgcgtctgtagtcccaactactcgggaggcagaggtgagagaataaccttagcccagggaggtcagggctgcagtgagctgtgatggcactactgcattccagcctgggttgacggacaaaaaattagccgggcgtagtggtgggcacctgtaatcctagctacttcggaggctgaggcaggagaatcatttgaacccaggaggcagaggttgcagtgagccgagattgtgccactgcacaccagcccgggcaacagtgcaagactccgtctcaaaaaaaaaaaaagaaagaaagaaagaactaataatattcattcatgtttacaacttatataggaagaaactgagccaaaagtaaagtctttaatatggcctcttaaatacattaactttcatgattaataggctagtatttcaaaagcgagtccaatattcatcatttacaaggctcagaattcacttacctggtatgtcctaaagattctcgccatattggtagcatcacaactggtttaactgcacactccaaaatggctaaagccaatgcaaattctctgagtttgctacacatctgaactgccttgatccagtttgccctgtatttcagaagaaatgaaagaaattatttcactaggttgatctaaattaaaagcataatagttgtaactttggtctccatctgattccaggaataaagattctgactcctaggaatcctccaaatagttagtggtgtcagttcagtaagttagaagtacactcatgcctctaacgtcctgtctgctgaccacattgacttcattcaactcattggtaatgacgttttcaagtgcacaactacaacaatcattttataaacatttagtatatttacagcaataaattaaccttagtttcctttacctatgtgatgcccggttgggatgaagaaaggatgaagggatgttgttttctaattgggtgatagtcagtctcagagtagatatggtaagaactttggacccatggacagaaccgttccatttgaactctcctgctggagtcagacagaacttatgtgcaagatgccttctcttatcatggtcttctctgtgctggtgcttattcaaagcaaatgaattagtggagtattgattgtggtagacgcgatacttcccttcttgacccaatttaagataattgttgatacttcctttcatgaccactttcttttcggtgctcaaccgtgaaatttctccttgagagttaactaccagtacctgaccaaaaaaataaaaagactgcattatttatgtcagccaaagatgtaaattgtatccaatcaactgtctttcaataattaaaattaatcactcaaagtaagttaagataaatcttatgatagaacttttgaagtctaaaagctaagttaaaagtaaagctaattgtttacaattaaacaaccaagatatgcctgcagaaagaaaactaacacatattaagtacctattacgtgtcagatactattattcactgctttcatgtattaatatttcaaatatacacatgaaaccatacatataaattactcacctaccattttttcaagtttataacaagcttttcaagtttatacctaagggaaaaagaagggcatcacaggtattctcccccccaaaatatattcctaaaaacgctcttttgggtccttttatcattccagctatagtgtaagacctcatggatacttcaaaatagtattttcaaacagttgatcccaactctttagtgactatgaaataaatagtgggtcttattcagctttttaaaaaataaaatgtaacgcagccaggcacagtggctcatgcctgtaatcccagcactttgggaggccaaggcagacagatcatgaggtcagtagattgagaccaccctggccaaggtagtgagacctcatctctactaaaaatacaaaaaaaattagctgggcatggtggcgtgtgcctgtagtcccagctactcgggaggctaaggcaggagaatcacttgaacgagggaggcggaggttgtggtgaaccgagatcgcaccactgcactctagcctggcaacagacagagactccgtctcaaaaaaaaaggtaatgcaataggctagcacagaaaatatcagagtgcttcccacataataaggtaaaacagtctttcagaaagcttttgaatatgtatactgggctgctatgaaaaaatgtgtatttgactgagggtcagagtcaaaaagaagtatgaaagccactacttttaagcaatcgctgtgatgttaagaacatcatttattcgtacatatttacactgcaaataattcttgaatctgggagacacagttggggccacgtcctgtcaccatggctagctgaagggcagagatactgagtcctagctctgatcccatgatctgattcacgatcagagctgggacgccatgctgtcctatctacagtgttctgctatcaatgggtaagcctcgtcctttagctgcaggttcacccggagtgatcatagctagaactgagcagtgaatcatcgataattctttaataaaccataaaacccaaaatagcctactcatatgtgtaaagaaggctttaattctttagaattgtatgtagaataaaactggtcatgtagtaagaaagtgtatcagccatttatagcatttatatgcctcgactgaaatttgggtatgcaactatgcttagaaagcctaatgtttttaatcttgttacctactacagctttggaaatagagaaaatacaattcaaaaataggtctacaaatttctacagattatatatatatataaaatatatatatataaaattatatatatatataaaatatatatataattatatatatataaaatatatatatataattatatatatatataaaatatatatataaaattatatatatatatattatatatataaaattagccgggcgtggtggcgggtacctgtagtcccatctgcttgggaggctgaggcaggagaaccacttgaaccctggaggcagaggttgcagtgtgcggagatcacaccattgctctccggtctgggcaaaagagagagactccatcacaaaaaaaaataaaataaaataaaataaagtttgttccctggatccagcatccccttttaacaactaaatcctttttcccttcctccttttcgagccaacttctctgtcccctcacttagacaaccagctcactgctcagaggccttccaccacttccttgatgacagacctggtccttgttaagcatgtccgtgtgaagagaccaccaaacaggctttgtgtgagcaacaaggctgtttatttacatccgggtgcggatgggctgagtccaaaaagagagacagcgaagggggatagaataggggcagctttacaggacttgggtaggcagtggaaaggtacaagttaaaggtggttatctattgatagcaggggaggggtcacaaggtgctcagtggggagctcctgagactcactgtccaggaggagattgtcacaaggtcaattgatgagttggggcagggacaatgcaaggagctggctgttttactcctttttgtgggtttttttttttttttttttttggctgctccagactttgtggctcctgcaggccatttggatgtatacgggcaggtcacaggggttacaaggaccttgctccggcttagaggcctgacaatcttcctctggcctgacttctgtccagtgtttgctctttaaaatcctctccttcttgggctttctcgggccaggcctcctggttttccttctttttctctgctactgctcagcagttgggccccaggctccatctcctccgccacggcctcatgcttggtgtctcacctgtcttctcactccaccgccttgggagagcccagccccactggctgtagatcaacaactcgcagcacagtctccaggctcacatagcccactgccatctggatgtcctttgtacatgttgaaagctgtgtgccccaaatcaaatttgtcctctccctcctccctccccattctcagcatctgagtgacatctacttctgtcacccaaggtagaatcatccttgcctcctgctggctttgcctcatctgtcactgagccctgttgatctcaccagcctaaaccttgcagacctgcctaccagttctcacgtaacaccagggttagaagaacatgaaaacactgctgcaaggaagcaaacaaacaccttgcaggcaggcaatgagtcaatgtccaggcagaaggaaagggcggggctcttcaagggagattgaagagacagccagatacaaggcatgaccttgcatgggatcctgaaccaaacaaaccagctgtgagagagatgttttaggataaggtggaaatctgacgatggcttaggtcatagatgacattaaggaactattgttaattttgtcagacataataatggagggtgttcatggagaaagacatcacttttcagagatgcatgctgaagttttcggggtgaaatatgatgcctagaatttataattcatcagcaataaataaataaataaataaatataaataaacatggcaaatattgttttttctcttttctctttttttttttcctagtagagcagccagcaaggagcaagtattgttaaatctaggcaataggtaattgtattcgtttttcaaaaatattatttttggctcagtgtggtggctcatgcctgtaatcccagcactttgggaggccgaggcaggcggatcacctgaggtcaagagttcgagaccagcctggccaacacggcaaaacccctcctctactaaaaatacaaaaattagcggggcatggtggcatatgcctgtaatcccagctactcgggaggctgaggcaggagtatcacttgagcccgggaggcagaggttgcagtaagacgagatcatgccattgcactccagcctgggtgacagagcaagacttggtctcaaaaaaaaaaaaaaaattctttttggccgggcatggtggctcacacctgtaatcccagcaccttgggaggcagaggtaggtggatctcttgagatcaggagttcaagaccagcctggccaacatggtaaaaccctatctctactaaaaatacaaaaattagccaggcatgtgcctgtaattccagctactcaggaggctgagacatgagaatcacttgaacctggaaggtagagactgcggtgagctgagattgtgccacagccctccagcctggtgacagagcaagattctgtctcaaaaataaaaaaattatttttacttttctgcatgttggacattttcttaagttttaaatttatttacttatttttaatatagaggtagggtttcactgtgttgttcaggctggtctcaaactcctgagttcaaacaatcctcccgctttggcctcccaaagtgctaggattacaggggtgagccaccaggcccagcctaattggacattttcataataaaaataaaattaaaaaaaaaattcctcaaacatttttactattctccatcctcactgtcactaccatataagcctgtgctctcggctacttggaaggacgaggtgggaggattgcttgagcccaggaggttgaggctgcagtgagccgtgattgcaccactgcactccagcctgggtgaaagagcaagaccttgtctcaaaaaagaaaataagaaaaagttgttcattatttctcacctggaaacagacttgctcttccagcaatccctgcccccgatgtattacagacgaagtagttcctctccctttcagacacagctctggagccaggattctgggaataaggccacttaaacacgccctgtttcccctctgctcccaactgtgacctgctactactgcctgagtcaagcagaggctggggcagtgggtgggtgggacctggctgccacaggtgagaggctatgtctgaggtggaggctcccaggggaaccctggggcaggctggcccatcatgggaccccagggagaaggcagtgtggcttttgtatccttgtgcccaggagctgaggggggccaaacaggtgggccaggtagtctctacccataaggccagggcaccaaggagacagagagaattcctgctggtgttttgacatcacggatgtccaacacccacaggctcactggcagagaccaccatcccttctccactctagggccacccctccaagtggggtactcctgcagcttgactccagctctgaggagcaaactcactctgtgacagctcagcaggggcaacagagagaaccaccaaaccagctgctgccaccagaccccagcacagccgggacccaggacgcactaaaccagccgccgctactagactccagcacagttgggacccaggacacactaaaccagccgtcgctaccagactccagcaaagttaggacccaggacacactaaaccagccgctgctaacagaccccagcacagccaggacccaggacacactaaaccagccgctgctaccagaccccagcacagccgggacccaggacgcactaaagatgccatcacaggtcatggggaaagacagacttgtcagtgaaaggtcacaggacaactgggacaacttagcccatccagagataaacaaataaacatgtatataaataagggagggtccacatctcattctgtccatccacattaaccttcaaaggattaaagatttacatttttaaaaatgaagccataaaaataatcaaaaaagaaaacaaaatccaatatgctgtatgtacatatatataaaagcccatatattttatatatatgtctctttatatatataaaagacttcaatatgctgtatgtatatatataaatatatattatatataatatgctgtatgtgtgtgtatatatggcttcaatatgttgtgtctgtgtgtgtatacatatatgtatatatataaatataagactttgtaacaaagactcaaaatataaaagccataaaataaacgagtgatacatttgactacataaatgtgttttaagaaaacttgtgtggcaaaataatgctattagcagagtcaaaagacaagctcagggtggcggagggaattacaactcaggtaataatagacaaagggctattttctctagtatagaaaaagctactagaactcaataagaaaaaaacctaacaacccaatacacaaacaggcaaaggatataaacagaccactcacagaaaaaaaaaaaaaagtggagggggacaaacagcccttaaatatatgaaaagatactctttctggaaagaaaaatgcaaatttaaagtaccttaagataagacatattatggtcagattggcagaaaaggaaagtttgacaacagttagttggcaaggctgtggggaataagacaccctcatttgtgttggtgaggtcaaattggtatatgcctcatgggatatacccatcaagtatctattatttaccttttgaccccaaaatcccatttttggaatttttccaacatctacctatacatatataaaagagtattcattatggcattgttgtaatagcaaaaaatgggaaacattccgagtgcccgtcaacaggagactggtaaaatggattatttgtagttgtagggaaagagatagaaactctctaggtataatctccaagatacattgtcaaaggaataaataaaagtaaacaagcttgtttttttaaaaaaaatcttgttttacacacaagatggtgtgtacaaggtactacctttgcttaagagagagagaaaattaagtaatcagatatgtagttatactagtttgtacttagaaactctggaagaatgaagaaagaatgaacgaaaggggtgacttttgagttgatggagaacagagcagggaaacagggtacatgtgagatttttactatagattttaaaatattgctttgattaaaaaaacctgtaaatacattacctagtaaaataaattcaaggctattggcaaaatagagggcctggagaatgcaattacaacttgaatacaaactcttaaggagactcgaatcaagcagaatttttaaaaaggactgatttttagaacttaaaatatgtcattgtattagttgaaggggaataaattcactcttgagattcaaatttgcagcctggaaggtcaaaaagaaatatcaaatttcagagcaaaagtacaccaagattgaaataaagatgccaaagataaactgcaggggacccagtcaggagcactcacatgcaaaggaaagaaaaggtaaaagaaacaataatcaagcaacaggccgggcgcagtggctcatgcctgtaatcccagaactttgggaggctgaggcaggcggatcgcttgagcccagaaatttaagatcagcctaggcaacatggcgaaactttgtctctccaaaaaatacaaaaaaagttagctgggcctggtggcgtgtgcctgtatttccagcttctcaggaggctgaggtgggaggatcacttgaactcagaaggtggaggctgcagtgagccgtgattgtgccacagcactccagcctgggtggcagaataagaccctgtctcaataaataaacaaactaacaataatcaaatcaagcaacaaatagatgttcctaagctgaaaaaagaccagaacctacagagtgacaggttctgtgagctccagatgagggtgctgcgaaaagaatccccatcgaggcatgtgctaaagaatatgtgtttgattaggaaccccagagaagggacagctgccaataatgaaatggaaagtgcaacaggggaagaaaaaggaaatcgataaccagatcagagggaagaaaaacacaagataaaccaataaatgtaaaataagccaaaggtaattaagtacagtagatcaattgttaaatgaaacatgaacagagtgaattctcccaccaaaagacgagtcatcttgggtttaaaaatacagtgataggctgggcacagtggctcacacctgtaatcccagtactttgggagggtgaggcaggtggatcgcttgaggtcaggagtttgagaccagcctgaccaatgtggtgaaaccctgtctctactaaaaatacaaaaattagttgggcgtggtggcatgtgcctgtaatcccagttaatcaggaggttgaggcaggagaatcacttgaacctgggaggcggaggttgcagtgagccgatatcgaaccactgcacaccagcctgagtgacagagcaagactccatctcaaaaaacaaacaaacgagaaaaaatgaagacaacaaaaatacagtggtgatgggcaacatgaagaaaccccatctctacaaaaaagaccaaaaaaaaaaaaattagctgggcatggtggcacacaggcctgtggtcccaggttctcggggtgctgaggcaggagaattgcctcagccagggaggttgaggctgcagagggccatgatcacaccattgcactccagcctgggcaacagagggagaccctgtctcaaacaaaacaaaacagtgatgtgacatatacaagaaattagtagtttcaaaaaatgataatggtagaaaataaaagaatgctaagcaagtgcaaaaaaaaaaaataaagtaaaataaggagtggtcatattaacaatagaagggtgaaatttaaggttaagcactataataggataaagagggacaccacgtaatgatagaaaagcacaatttgtaacgacatgacagaatactcaaaatctgcaggctcccgacagcatcgtagttaaatataaaaagcaaaaactaggaaaagcaccagaagagctttatagagaaaatgtgagtggaaggtttaacataacacatctctatcagaattagagtaaaagacccctgcccccaagcaaaggatacaaaggaaatgaaagtttgaataatataatcaataaacttgatttgatgcagttaggaccttatagcccttaaatggaaaatatgcatttttccgtccagggattaatatgcattaatcccagcactttggaaggctgagatgggtggatcacttgaggtcaggagttccagagcagcctggccaacatggcaaaatcccctctctactaaaaatacaaaaattacctgggcttggtggcgcacacctgtaatcccagctactcaggaggctgaggcaggagaatcgcttgaacccaggaggtggaggttttggtgagccaagactgtgccactgcactccagcctgggtaacagagtaagactccatctcaaaaaaaataaaataaaaataaaaataagaaaatatgcatttttcttatatgtctatgaaaaacttagaaaaatcatttacttggtcacaaagaaattcataataaattttaaaagtggagattttacacatctggagaaaatgaatgctttcctagtaaaatataaaatggccaaaattaactagaaggtgagtagaaacttaaataaactaattaccactgatgagaaaaaaaatctgccactgaaaaaggcaccaggtccagagggtttcatgagagggaactgtagaaaccttttgaattcatctttgccaacaccttcctcctccaggaagcactcttggatttccctcttgcgaacaagattctgggaggatggctcctccaacatgccccccacagctctttgcagatgcatcatgtcatatcatatcatatctgccataccataactaccatgccataccatatcataattggatctgctgttcaatttctcctggacagtaagctacctgagggcaggaaccatcctttatttttcattgctccctagtgcccagtacagcagctgacattcactgactaggtgaatatggtaagtgaaaaagcagaaggcacaatcgtcattacgctgtgatgtctctatgggaactgcccaagacatacacataagaaggcagaataaatgggaagaaaccaacatgctaacagtcatttgattgagatttcctcctattattcaaatatttgtaatggagttaagctatttttatagggagggaatagtaatttacacatttaactgggccaacgaggagaaaggaagggggaggttgggaggattctgcaggcaggcccttctgctacctctgcttcctctctctggcccagcccctagacagacacaaaggcctggacgggggcccctgccccactcccttcatgcctcacaggggacccccagccaggagaaggcaaggaggcagggtgggcacccacaggggcctcagttggacagaagggtcctgcggggctcacctggcaacagctctgcaagttccctcaacaccagaatccttctgcaatctggaaacagagcttcccaaaatttagcaagagcacctgtgcccctatgcccctgtgccccagagccctagtcctggcagccctatttccccctcaatatgaacaaacagccgctgacctctcactccccggcacagatccagctctgaatctccctaacattcaggcatggagccccgaccgcatttctggtcagcagctaccccctggtcacgatcatggactttcccattccccagggcctggcactgaccacccatccaggctggcattcagaagtactgatgcccacccttccctgtactggacatagtcatctctaagaagggcagagaaaataggtccatgggagctaagctatgaggaggcaaaggcctaagaatgatataatggactttggggacttgggagtgggggaagggtgggaggggggtgagggacaagagactacacattgggtacagtgcacaccactcgggtgatggctgcaccaaaatctcagaaatcgccactaaagaacaaacaccacgtgctccccacaactattaaaataaaataaacattaaaaaataggtctagagtgaggtcaactactgaggcctgggaaggaagtgagggggcaggtggggcccatctcaggcctctgggggccgaagggagccagggactaaagaggtgagaaccaggcgcaggctccagggagacccccagagaccatgtggcctgcaggggagttgggggggtgtgcagggagatctctggggggacagcaatgtggggtgagggtgggaggggtacccaagaagctgctctctcctaagtcaggtcctaggcaggcagaggggctcttgggacagcctggggctgcaggtgagtccctgggagggagacagctgaggcggctgccccagctggagggtgggggtgagggttgttggaggagggagtacaggcaaggggctagctggagtcccctcaatttggacttagcttcctgctattaccaacgccccttgccaaaggctccctggctggccctgagtggggacaggtgggtctgtcccgaggccagtttctttctctcaatcacagcggcctcgggctgccctcggagtttgtcctaggaagtgggtgctgggcctggatccagagaggaggggcccccaggtgggttttaggatttgggaaagggaggggagagagtggagaaactgctgtggccgccctctagtccctcaggggcaagggctcactcacagttcccagcggaggaggagaaatgagggcccccgctccttccagtcggggctgcctgctcaggtgcggcgcctccagggttgcttgtataagaaggtgcagcagaccggctggaacttccctcccagcggccaatgccccagcagcaggggcgggctccaggccagctccacccacctgggccttcccacttctgggtggggatggtgactgcaccctgagatcccagagccaggaccacagccatggggaagagtctcagaggcccctttattgcaccgcctttggcctggcttcccagggctccctgagtggcctctttgggagagaggaggagtcatccctgcttacctctccctgtctccctgtctcccctctcagaaggggttgcttctgccctctcctgggcagcaagagaacaggagacgtccctctcctgggacatcaactctcccaccacagggctgggcacgcaggatgctcagaagaaggagcgcttgcttgccttcagcttgtactgttcttgctgagaggaacagggtggccaaccctaaaggccacctggctgaaactgaacctgctggccagggtggggcttggggtcaggggcctggaactgtcctggacacagccacttcctggctgtatgagcttcgtcctgtcactaaacctctctgaacctctgtttgtactcagggcaaatggaggtgcctacacctgccttccaagctgctgggagcttaaccctgggttacaagcctttgagcaagagcccacaggactgttagcccctttgggactgcgtcttaccacactttgtccccagtgtccagcacagtgaccagcccacaccaagtactcaatatgtgcgattagagtgcatggggagtgacaaggctgtgaaacaccatccatggcaggaactcctctgttctgggggtccctggccttgcccagtagcctgccctaagccctgagctgccgcctgacagacgggggtccctatacactccccagtgcccccgtgccatgccatccccacatcctgccccctctgttctgcacccactttcttccgagatcccttctcagcaacaatctcctccccatcttcagcctccccatctcctgcccacccacctgaacctggggatgtttccatctatgacctacaccccctctggccacgctgtgtctctctctctccttctgtctgttgtctacacactcaattcgcaccctcacttcactcctgaccactgccctctgccttcagcacccccctgaccagctgagcttctagtggccacttcggataagtgttatatggcctttctctcacgtcaccttcctgtgcatctttcttctggacacttcttgtcctctgagccagcactctcatgcttctcttccctttgtctggcacctaaatccaggcaggccccacctttctccaccctgctcctccccaagtcccccccaccccccaactcagtaagcagcaccactgtctgcccacaagtgccagctgggaatctgaactcaacccgatttccctcccacctccctcggcccccagaccctgcccatccatctcccaaacctctgttaccaccacatgcccacgagaccaccaagagcttcggccattcttgaggccctggccacagggatttttttctcaatcccattcctgtctctgctaaaagcctcacagcagctgcaggataacgtgcacattcctggcaagggctcatgaggccctgccccggtgggcacccactctcaaccccatgctccactctgagccccggccccatgtcttctgttgctggcctcctatccaagagggtgagtcccccaggaccgtggctgtgcctgagtcctctctagatccaaaggctcaccagggctctgcagctatttggctagttcatgcctaatgaacgagtgaatgggcctggaggattatggtggggaaatgccgcctgggacaactaagggcaggggtggggttcccttgtgggggcaggaccaactccctaccctggactttgttgggggtggagcaccagggagagccacagctgcctcttgaataaagctccgtggcagggaacgtggtattattgcactcattgcacaggggaggaaactgaaccagagacgcaaagtgacttgtggaggtcacatagtgaattagggccacaagtggggccagggagcagcctgtctctggccaatgtcctagttcccccctgggtaagtcccctgccctcatcacctgtgcccctccccccatatgccactgcaactgggaacctgctgggagctggaggaaggatgggcagaggggccacctggcaggcgccctggcagccggggtgatctgtcttctcaggagatgtcaggacctgggcagtctccttcctctttggtcctggggcctggggtggtggcccttgggcagacctacagaggcctggctcataggtaaggggctgccgcacctccgccctattcaacatacactctctgtgcactctgtctgagccagaccctgggccagatgcgaggttcaaagagcaaggccattcccccacctccaggggctccgctcagacgggcaggcaccgtcccaccgtcactaggacagagaatgtggagaggccgggaagtgcgccaccgggagcctgcgcaggaaacggaggggcgctgcgggggaagagcgctggcatccagccacccatcccagagaagctgcctggctggctggcaggggcgcgaaacaggaaccagccgcggtctccagccccgcccgccgggtgccgttttccaccctggccacaaggcggcgggctgccgctgcaggagccagagtgaaggcggcgcagacccagggaagccaaacgaggatgacccagtctgggtggaccccctgctgctgccaagcgcttcgaagccttaattcatttaaggctcacaaccctaatccttaggtattgtgcttacaccagaggacgctgggcctggggggggagggggtggtcctcgcttgtaagttaagtggctgtcagcagctggcagctgccccagcaaaatccagttcccctttccctagtctcaaaacctgagctctgcattgtaacgagacaggcggagggaacacccagcagcgggcctacggaggcgtgtctccttcgtctgggcatcccggactcagtcctggcacatggtgggcatcagtgttcatggtaatgacatcaggcacagcgaaataaatcagaggctcccaaggttcagaggtcatctgtccatcccctccctttgtgctaaagaacaaaccgagaccctgagagaggaagagagctgcctctagatcatcacacggccggtggcagatggcagaacggttctaagcatccttttctccccctcgggctgcccctccctgaaaagttcctaaagttcaaaatgtcagagtcccccagagtgttctgaggatgcaagagtgtttgtaaaacgtgctctattttcgatttcccagattaacacaactggattctgaagaggggaaaaaacaacctcacttaacacgtctttctgaaacaaacccatcaggagttcttttaaaaaaaaaaaaaaaaaaaaaaggaactgaaatgctggaagcaccctcaaagggaagcagacgcctgactttcacatccaccctctcatctgactccaggctccttgagctggcggcaggcccgcaatcccccgttccgtgcccagatgcacttcggaatatagaacagctgggacttggaaagataatatgtggcacccacctgctgtaggttacataacctcccagcagggcttggggcagcagccggccatcgagcttatttgcatttctgcagcaaaacatgaatattcacacaagtgcgataaataaagaccatcaacagcctcatatcagttcaagcgcaattttgccaccaatttgattacgaaaaatctttcgggcttccagggagctttggagcctggaaattgcagatgagggatgggggcctgcactgtttcgcggctggggagagggagctcatccgaagtcttccgacagaggtgggcgtcatgcccgacgctgagcggagtgggtctcctcgagcccaggctccctgcgggcgctgtcctcagcgagcctccccgcctccgcgcccggggtcgtacctgcttcacgatctcctaccgcggcgggccgcgtacctcctggatggcctcttagacgttctctgagtcgctgcgcgacaggggcagcaggcacacccaggagcccgctacgctgcaggccttgaagctgccgctgcttccgaggttgccggcgggaggcgagacgacggcgcgcgtcaggtcgtccagggactgcgcgggccgcacgggcgccgtgggccgcaggtacaggcaggcgggcaggccgggcgccaggctgctgcgctggctcgcggcgccgcgctgcgcagggccgcacagggagctggccccgcctcggggctccgctggggggccgttgggggccgctgccacagccgcgctcacgaaccggtagtcgtaggcgagcggctcaggggctgcgggtcccgatggggggacctggcggcgcgtcagcggcagggttgcccagcgcaggcagctcgcgcacgtactgcgcgggcaggtagaaggggcggccgccgggcttgcgccgcacgtgccaccaatgctcagtgctctgtgctgcgccgcagcggccggtagcgctcattgggcgggatggccacgcggcgcccgtccttgccggtgtactcgaaggggtgctccaccagtacgtacacgtccccctccacatccgccgccattgcggccgcggcattttcctgcaggcaacaaggaagagggccgcggaagtcaagaccactgagcccggaatagcccagcactcgaggagagacttgggttcgagtcccgatgctgcacttgccgttcgccttcgggcctcagttttcccatttctaaaatgaggacttgaataaaatcacatgcaaggcttccattcttacactcagtgctggaattaggacaacctcttcattccgtggggttgattctaagatttcagcctcgcttcagtcctgcggtggggagattgtgggtagtcttggtccaaatcgactgcgagggaaactttggctttaaaacgaggggtgattacctgctctaaggtcgacaccacgcttgcttgatagttgaccgtgccttagttttcccgtcagtcaagtgggaagagcagcccatttcctgccgctccccgggccctgtcccgcctggacgcctccctccaggagcctgcgccccggccccggggtcagggttgggatgcgggctctgcaggcgccccggcgaacagctctacctggaggctgtccctgccccgcttagtccaagggccttggtgtgggggcctccgctgtcaaggcgggggaaccggttctctcggtttctctccccttccccagcggcttcaacgcagacgtgagcccgagccgggcccgcccccgccccctgctctccggctctcacgccgccccccgagagaggctgcccacctgccctgtgacccctacagtgtccccaagagagtggcccctggagaatgcactctgagacagtgactgtccgtgcggagtcccaaagcaggggccctcaaagctctccggagtggtcacaagccccgctcccgccccggctgggtgtgtcagggatgggggagagcttaactaaatctgccggcgcccctccaccaaagccatgagtcggtggtcttctccggaagtgcatggcccctccaagctcccacactgaccacatctcctcctgcctcctaaggtgacccaggccaagggccaggagaccgcggcttgccgaggctgagggaccgaaggagcagggtccaatccgggactcccgtagggctccttcgccactttgtcaagcgttcctcgactaggaaagggtatacacttgagtcactaagcacactgggccccggaggcggggtcatcgagctgcccagagccaacaaaccccaaggtggacactgccccggcgccccttccccccggaccccgcagcgcactcacgtctgctgggcgggcctcagggagcccaagggccgggtgggcggggccggcaggttaggcccggaccatcgccctgggcggggcttccgaggtggtgccggagaggtttcgcggaatcggagctggcaacggcagcgaatagggacagcgacgctcaggagtgctgtcacccatacccaaagaagctgcgtctgggcggggcgaggaggaacctgaatgcctctgctggggaccttggggggcattgggacgaggaccggagcagaaagccggggtccggagccaggaaggctgcgtctgaaggggcgctggctggtcgctagcggagcccaaggagggtgggcctcccctgtcccgccttcccccttcccttctcccccggggatttgctgtcccggagtccctgcgtccctcccgcctgcggctctgggaatgccggtctggggctggttgtctagtgcgggcgttcccgttcgcggggaggtcattggcaccctgaatcacccactgcgagcccttccaaccggattgtagacctgccagctccgggcccacctcccccaacagggcctttcccggagcaacccggccgggcctggaaaaactccgagagggattcccagcgcagggacgcccaccggagcgcagtgtctcgggctggataagaaggggacccggccacagctccttcgccaacctgcgggaacacagagaaggggagggattggtgggggccgagaggatccctggagcgcgagagcgcacccgtcgccaggaggtcccctgcgtccactgcccaggcgacgcaagctacagcggcgtcaacgcctgggtcggcgctaggggcctgggcctgctccccacccgcctccagagggagggcagcccttcgcctaccttctcctccccgtgggatgcggcccgagcagctcccgccccagcacggagacaaggggagcaggcgcgcggagctcccgggtgcggacccgccacctgccgcacccttccctccccaaccctgcccctttccccacccccaccccacctcccacctcaactcccgctcggcggcccactgcctgcccgggcacctcggggcgtccgctcgccggcctcgtctccacttgtcccggcaggcgcgcgtgggctcggcgtcccgcgctccctcctcgaccgcgcggctccggcgctgccaggtttcctgtatagcactataaccagtgaggcaccggcggagagcgcccggcagaacttcctcccggactggggctgggctgcggttgcgagagacaatccccggcgtcctggcttcctgtcgcctctgggccaggcccgcgcctgaagaggaaagatgccaccccctcccctgcatttcccgggatcctgggccactcccgggatcctggctgtctccagggaggaagaggccgcggggctgagatggtgggactggggatggcgggagtctcccgcgcagcttctcctggccagattgccttcccaccatcccccactccctcttgacccttgcggggaaagaggtccaccctccaatccgtccacagggtaagctcagaacaacctcctgggggccaggagtccagccccagggccctccgccttgggggtcttctgtttgggaattatctgcctctctggacaagctgcctcgccctgatctgagcctgcgctcactccacacgtcacaaaccacagccctagcagaccccctgccctcaggggcccccagaaacagttgtgcctatggacgtggctgtgtgtgcggagagctggctgattcaggccagtgttctgggacgaagagaagcccacaccccaggccatggcccctcttgactccacctcctgggggcccagggttggatgggaagctgaatctggccacactcgttctggaactcccttacctctgtatctttgcccctgctaggcgttgcccacccgtgagtctacacttcctctgagaatctcagtgtgtctgaggcctggtggcactttgggaccctccagggtgggcacacagcagaactcagcattggtctttggtgcccgacatgcttagaaaatagtgactggaggaatcttctctccctccctaccttttaggtctctccccacctgcagcacagccaggcagcggctggcagtggtgatggtctttgcgtggggtcaggcaggtatgatgccccactctgctgcttggcggctggtaggccttgggagttctgccttatctctgcagctcagctttctttcctatcaatagtaacacccacttcactggattattgggaagattaaatgagatccactaagcagtgcttaccacatgcccagcgtacaccatatatcagctatttttttttttttttttttttttgagatggagtctggctctgtcgcccaggctggagtgcagtggcacaatctcggctcactgcaacctctgtctctgggttgaagtgattctcctgcctcagcttcctgagtaggtgtgattacaggcacccaccatcatgcccagctaatttttgtatttctgcagagacggggtttctctatattggccaggctggtcttgaactcctgacctcaaatgatctgactgcctcggcctcccaaaatgctgggattacaggcgtgagccacagtgcctgcctatatcagctattatgacacttttattatgtgatgagctcttggggtttggactggaatctccaaaccacccgtcctccttcaggcagaagagaaggggaagtcccagctactcgggaggctgaggcaagagaattgcttgaacctgggaggcggaggttgcagtgagtcgagatcacaccactgcactccagcctgggtgacagagtgactccgtctcaaaaaaacatgggtgagaaggggaaacaagtgccctcagaggcgcttggctgaggatggagaggggctgagcccactggcagggcagaaccaggtcatgtgccatggccctccactgggcctccctcccccagtttctcttctcttctctggccctaccatctattgtccttgggggaagctgtggcacctagatgggcagagggtgccaacttgtaatctgaaaggggccttcaaggacaggaaatcgcagatctgaatgttgtctgtttccatcccattttaccgcaatctgatttccctgagaattagtctgtttccaagggcgccttcgggaagaatcctcacaggcctaagccctccccaggccagactcctgcccactcagggatggggcaatgagggctctgaccaggccaggcttgtggtcatggcaggtgcataacccagctcctggcttaggaggtattggcatctgggcacaggtgtgcgccatgaccgggagaagctatgcacagcctccacctgcctgccaccgccacctctgttctgcacaggcatccagctccaaagctgggtgggtgactcagcagctgatcacccccagggaggggtgggggtgggctcatctctgacagtgacaggtggatctccacctgaggcctcagactccaagctgagcgcaggtaagacagctaggactgagggcccgctgggtccaggagaggtgggagaaggcgacagagagaccagcaaacccacatttccctgaagcctggagggtctgaacttcacttcaaaaacaattccaggctcccaccccagcaccaaggccccttcaaaggcagtcctgctccggggaagttcttcagtctccagtgtcctggctgggcaagttcagtgatgctttgggaattcatagctttgtgaggcggcggctgcatccacagggcagctcccccgcatgccctgcacagcttagggcgaaggaccaggtcatttctccacagtgcagggcccagctgcctgctgtctctagggtcctgcctatctgtgccctggcaggggtcagtcaggcagagagggtgaccccgggcacccaccaaggtgggcctggagcatctgcagcagtgcccctgtctgtagaggggtgaggagggcacggggattgggggtgggcaagacggcgaccctccctaaaccgaggagggctcatagtgctgaaagtgctggtttccagtcatttctccttctcctaatggggccaaggccccaggctagagaagagctaggggctctgacgctgagaaaggggtgggctcagcaggtgagacgcactggggtggggagtaaagaggagacagagaggaagtggggtcaccaggactggccctgccctgctgaggggcggtttggcactggcagtgagggccaggaaaggcactgggtgggcccacaggccctgtcccagcagtggcctgcccaacagccacccgctgcctctaggacaggcctgagaggctcctgtgcatccgctgggggtgaaaatgtctggatttcatgggtgactcgcatacggtcaagaataaaaaatactttctgttgaaatatgaatgggaaaaacccaccttaaaaaaccagaccttttaatcaggaatgtggaattgaaaatgttccccaagtcccctttccacagtgtttggccagccctaacggaggcgccgggacgctggtgagccagggcctggtgagtaaacggccctgcctgccccagacagggagcatctggtggtggccacgcctcctgcagcagaggggtggggggagggccaggggacatcatggggacttcctgggctttctgtaggaggccagtgctctggtcacatctgaggtcttcctgacaaggggacacagctgtgacacggtgagtatcctgggctgataggaaacccagctgggatggctgagccacactcacccccggccttcagagtgggatcagcagaggggcatcaggcgaaaacgttctgttgctggtacttgcgtcagcgagcacagcgggggcagcccttcttcaccacagcctggcagctctggtggaagacggtcttgcacttggcacacctggggagagagcagcacacctgctggtgccggctgggctggaggttgacctgtggccacgctggccagcacttttgaccagaacccacgatatggctgtgacatactgtgtaacccatgcacgcacgctgtgcctttccatcccggaacaggagattctcgaaacagtgcttacccatacgtcacacaatgcacactgatattctctgtcctactgcattttttataaatgctgcttgagattcattaaagatttcttacctgtattttaaaaagcatttacttatttatttatttatttttgagacagagccttgctctgttgcccagactggtgtgaggctcactgcaacctctgcctcccagattcaagcaattctcctgcctcagcctcccaagtagctgggataacaggtgcccaccaccacacctggcttacttttgtgtttttagtggagacggggtttcaccatgttggccaggctggtctcaaactcctgacctgaagtgattcactcgcctcggcctcccaaagtgctgggattacaggcgtgagccaccgcacccggccaagactgtataattttaaaaactcactcccaggcccattcagggctgaatcccggccagtggacaccgataaaaaaagaactaatgttcccagttcagttttccactcccacatgggttgcaggaaggtctggatgaatttttccattgagaggttgctgataatgagcaataactgggaacaagagggatcatttcagcaaccgaggcagtagcagtggcagtggcagctaccacccaccaggtgcccactttgtgcctggtcttatgccaacagtgcagggcggtaactcatacaaccctcctcaacccatgcatacactgagaccccaggaggctccactcagagagccggcagccacctcttctttaggaagacagatggttctgtagaggcagaggagtcctgggagagcttgtcttgccccctgaactggtccagagctggccatgactgcccagggcgtgggctgccctgaacaactgcaccgccccttggcacggcacaaagcagatgttcaatacattcctgcccatagagcgaagcctgctgccctgcgtgcttgggccaggctgtgggtgtggcgaagggtagggctgggaggcagctggctgggtgtcccgcatacctgactgtggtgtcaaactcagaggggaagatgatgtcgtggtgctggcagatctggcagatgaagctgcgctgggtgcacaggtcgcagtggtagacatgctgggaggcaaattcaatcagggccttgaggaatccttcatatacctcatctgcgatctgcggagggtaagtaggaatccttcatacaccccgtctgcgatctgcggagggctggtaaactgaggccccaggcctttcaagcagctgcactgagtcgccatggcaccctgcctagagaacttctacccccagtttccatgcgggcaagaaaagaaaacctccctgaatcaggctgagtagtggcagcatccagcccgtgggtactgaggtcactcggggcttatgggatttatagatgagacccaaatccactgtaccctccccttggggaaaggagtattccaaactctcttccctacgatcctggggttgctggagttttatttcaggggtgctgggggtatccgtccctgcccaggaagctggggcagcagggcaacccaccctgagctgcagaaaagctgcagactgctgtcttcttcagtaaactacagacaccctctctcccatcttccttgctgacttctccaggaatgaagtctttctagagttctgggcggggtaggcatgacactctcacctgccggaggtcagcaacacggaacctatgcggagactccaagagataattccggtggttgagccttcaaacaaaacacaagcgattctttagaaaagtttcgaagacccaggccagcccgtgttgtttattttcattcccctggcgctgctcaccaggcagacacctcccgcctgggcggggcagggcctaggagcacaattcagcctgcttgggacccggtcttcaaggtaactaactagctggttggaccttggacatgttacttaagctctctgaaccttgggttcccctctctgggaaatggagttgtctggattgagtaacttattgaaagcatttggcttggtgcagagctcacagtaaacatgtaattaattaattaatcatgaggaggataggtgctgacatctgggaccaggaactgggctaagagcttcatacgcactcattcatttgatcctcacaataatcctgtgaggctggtactaacacaaccccaactttgagaagaggaaacagagaggttaagtcacttgcctgaggtcacatatctagtaggtgggagagctggagtttgaacacaggggcctggctcctgagcctgcacccttgtccacctggtaaatgcctagagatgcaggctgttgtcattattgccaaagtcacataccagggacagtgctggggacagtaatgcacaggatatggcctctgccctcctgtggcccctggtttggccgagggacagacatccaagtgtctggtttcagtgctacatgagagcaaccgagacgtgtcctaagtacagcagtcccatttcagaggtggcggggggagcagaggacaagggctcagctgccaacgcggctctagtttccaccacaccaacggcagggatccagcgggccccatccagagagatggagaggaaacacttgcagaaagtcccctggtacaaaacctgcctggcctggctgtgtgtgtttacatgggtactgggggtgggaggttactccaagtcagaggatgcttgggaacctgccccaggatgccccagacatctggggacaggatggtgccagccctgggtctgggcctcccaggtgcaagctgtggagcatctggaatggggacttggccttgtcccagctagtggcctcagctgtggtccaggggagcccaatctggggtggagagggtgagtctcaccaagcagccacacaggccaagatgccaactggcccctcagtttaccatgctggtgaccccagtaaacttcctacactctaggaagggaagctgccatttgtcaccaagaaaacatgggacacagcgggctggggggacacaggttggccctcagctggcaggagggtgggctgatctggatggagaattagctttgccatctgtcctctgaccacagtcgtggaagccctgggagcccctgtgccctgggcctgtcaccctctcagcaagggcttgtgactggcttctccacagtgctcagtcaaggccagaggggagagggcgccgacccaggggtgagaagccacttcccctcctggcttccaggagagaaactctcatgcaccagggcacagtcagccctacttagggcctcagtttctccgcccacacaataaggagaacctctttgtcctctggcgtgaggctggctacctgggaaacagaccagaggaatctggacggctctccgggagagaggaagatgaggggaaaggtcgactcttagctcctggaaccgatgaagtgatggggaaggaaagggtcaggcaagggctggaagatccgggggacatgggtggggggcctgggtgccacctgtctcctgagccctggctcctcctctgcccacccctccccggctgtcgggagggacagccttccctctggctgactcggtccaggcccagctccctgggctaattactaacaccagctgccacccagggctctccccttcaccaactgcactccgctggggccagaatggtctttttgtgtgtttgttttgtgtttttgagacagagtctcgctctgtctcccaacctggagtgcagtggcatgatcttggctcactgcaacctctgcctcctgggttcaagtgattctcctgcctcagcctctctagtagctgggattacaggtgcctgccaccacgcccggctaattttgtacttttagtagagacagggttttgctatgttggccaggctggtctcaaaatcctgaccgtaggtgatccacctgccttggcctcccaaagtgctgggattacaggcatgagccaccgcacctggtcttttcagagtggtcttttctaagccgctgaccggaagtgacagccctgtgctcaaaacccttcaatggttccccacaggtggcagatcaaatccaaaggcctcgagggccctttgagttctgggccctgcacctgaagcccagctgcccagagcccctcaagggtgtcagtgagctgtgctcctgccagcctcttgctaccggtctcttagccaggaaagccaggttctcccctgccctttctactcttttctcatttttctaagccccagttcaacagacacacaatgccactggtgtggcaacatgtgtgtgtggatggagtgaggtgcagaagcaggtggtggtgggctctgagaagggctgattgaatggtctgctttattccctttcataaattttcctcgcttggaagattgacctttgtaaagaagaaaaacattttagaaggaaaaaggaaaatatctctgcatgccctcagctcagatgccatctcctctgggagctcctctggcccctgccaaggctggatcaggtgccctcagggcacacacgatgctgacccagggccatctgtggcccagactctgggtccctcatgcagccctcaccactgctcaggaggccacaggaacagaggaatcactggcccattttatagacgggaaagctggacccggagaagtgaagcaactttcctgactcacagtgggtgagggcctcccacgctctttcccctgccccatgctgtttccatgggacttccacaggcatgggaagcaggctgagcacatagcaggagtacagcgctgctgcccagggatggagcaggagggtcagggagagagagacagggctgcccctggtgcccacagagacaggtctgtaaagccgatgaacaaactctctcagcagggcagggatgggtgaatggggctggggtccacaacccaccccacaggcatctggtctacacaggtctgcatgcctgtgcaggtacctggctccttgaccaaggagggtgataaggccccacctgaccccagagatttcgccacctggttaggtgggcaggaggatagtctctctggagccctgggtcatggactctcagaggtagggagtgagtcagcgcttgccaagaggtggagacccagtcacccacggatgcttgggatgggcagagcctcctggggtgaagtcttctagggtctagggtcccacatggtggtccctggaaggctttctgttcttccaggccctacagaggagaccaaggctcagctggcagctagctgtggggccaaattctcctctctgcctaggggagagccccctgcagtaccccttgagagcccctggggacctgcctggggcacaccctggccctgaggaggcccggctctgggagcactgcagccaggatggaggaggcagtcttcagagaggcgctctctgggccagccctgtggggagggaaggccagacgggggaacctggaggggcttgtgaaccggtccctgcccccagaaacccagcagaggtggatttgaagcccattctgggcagtaggcaccggcaggcttctccgcctgaggtctgccctcctgagggtgctgggagagcacagccctgggaagactgcagcctgggcgtgacctgaggactaggaagtgtttatgacagacatggagaggcctaagtccctgttgaagcccagcatcacatcccattcctgagcaccaaaggccccaggccctgggtaagagaagcttcctgaagggcatcctgagggccccgcccggatcacgtcttctttggacaatttcaggagggaggctggcatgggccagacgactggctggtacagggaagagacgggaacatctggccctcgcctgcctctcgccacactccccacttccctcgtcactgtagccaaagttctccctgggctttccaccaacggtgccttcgttcatggcctgtgcgtgccattccttctgtctagaatgctctttccccctttgcttctcctttctgattcttcctaatttttcaagtctcaccttataagtcacttcctccaggaagtccttcctgctttgtcctcctctgatctgggctggatgtcaagcctctgtggttccaggacgtcctgcctctcaccctcacccccagatggagttgctggctttcccacctgtctccctctcaccctcagccccggatggagttgctggctttcccacctgtctccctctcaccctcacccccggatggagttactggctttcccacttgtcttccctgccaggccagaggcttccagcgggtcagccctggctctgccctgctcagtgttggagcccacatgcctcgccaggtgtgcagtgcttagtatgttctcagtccatgtttttgagtgaacaaatagatacatgaacaaaaccccaaaatcacccccaaaagatgtgatcatttcccaggcccaatgggaagatctctgcccaggtttcctctaggtggacgccttgccctgggcactgcccttgtgtgtgtgtgcgtgtgcatgagtgcctgcatgtgtgtacatttgtgcacatgtgcatgggtgtggatgtctatgcgtttgtgtataaatttatgtgtgtgggtatgtgtgcacatgtgtatgtgtgtctgtgtgtacatgtgcatataagtatgtgtttgtgtgcatgcatgtgcatgtgtacgtgcactcacacgcatacacgtagaggttgctcacctcttgctgagctccttcagggcgccactccggcacaggcccaggtaatcccccaggagcttcagctgctcccggctcctcccaatgaggtgcatccgctccacatgctcgtacagagacgcgttcaccatctgcaggttgatgaggggctgggcccggatctgcgtcagaaacttcagggcctgcctgcagatctgggggtaccaccagacattggggatgggaaggaatggctgttcagtgagcactgcctggccaggtgccacatgacctgctcacttacctgaggggctatcttcattttacagatggggaaactgaggctcaaggagatgaagagatttggctagggtcacccagcttgtaaatggtacagtcaagctctgaacccagtttatctgactcccaaacccgctctccctctaatggcaagggtcactgccccctccccaatcatgctgagatgagggagggactgctctgataacgccccctccctctgggcctcacagatccttcccactctttcctgtcctcccagccgctatttcctcccactaaaggaaacaggcactcccttctgtgccctgattcaggaaccaggtgacaggctgagtcaggctccagccacaggaagctacagatcagacacagctcaccaacaggcttccctgagctccctcggctcacaccagtagcaacaccgggactctgtgtgcagctgagtgatccatctcagtctctcctggctgacagggtgttgaaggttctacccttggccctgatcctaataccaatgccaataatcaagcgcctactatttgcaaaacactgggtcaggaacttgaccacatcctcccgtcattctcagaacaacctgttagggagggtgtccctgtccctgttttctagatgaggaaacggaggcttagaggggctaacgtagcttatacaacctgcctgcagaacctgccaggtttgagctgaggtgtcatctctgaacaccaggctgctgcactaatcagaagccccctcccctgcagtggcctcgctgcatcataaggacggaggagctgttgtctccacagccgacaagtgcacagtgattagaagtctggctttggcctggctcagatctttaacatcttaactagtcctctcgttacatattttatttctggtggctttgtttttgatactattataagtgattatcttttaaaatagtaatttgtttgctgatatatagaaatgaaattgatttatttgattgttatatccagcaaccttttcaaattctgataaattgtgtaggggaaaaaaagtctggcttcggagtcagaatggaattgaatcctgcctccaccactttatacctgtatgaattggtgaaacttatccctctctgtgactcagtttcctcatctgtaaaatggggaaaatgagagcaattaaggctcacgggtttggggcctttttgttcgctgctgctgctttagtgctgaggcccggcactcggcaggatgtcagcccaggactgggacttctttttcatgggattattttgaattcagattaaaagaggtattccaggagagctcctggcattagggcctggcaggtggcacatccccagtaaatgtgagctgttatcagctgctgtgtgagtgcctggtatggccctgttgtccccttgagggttgggggactaaactggccctcaggagacctgcccctgtatttgggggctgagggggcctctgacctcttgtctcccagctccaccagcatctctcacctccccccgcaatggacaacctcttcttttcccaaagcctggggccctgaggtaccagcccccccagcctagggacagcccaatggcaaactcctggtgacttgggtcaagctgctgttctccaatcctaactcagctcttcccatgacttggccccaggccttgggtgaggctccagtgaaataacacacaggaatgtgcgctgaacactgccaaccactgcagatgggcaggggctttgtgctccccagcgactgttcctatcctgtgggaatggaggagacagaaagaagccccactcctgggctgacatcctgccagtgccagccaggcctcagcaccagtgggtcagccagaacagcaacggcgaacaataaggccccaaacccgtgggccccccactttctatcttgaatttccctgtctttcctaggccagcaatctttgagagggagagcgagctgaggatttcctgatctcagatatgcctagaaaaggattgtacttttctttctttctttttttttttttttgaggtggggtttcgctcttgttgcccaagctggagtgcaatggcgcaatctcagctcaccgcaacatccgcctcccaggttcaagcgatcctcctacctcagcctctggattagctggattacaaacatgcgccaccacgcccagctaatttttgtattttttagtagagacagggtttctccacgttggtcaggctggtctcaactcccgacctcaggtgatccgcccacctcagcctcccaaagtgctgggattacaggtgtgagccgctgtgcccagctaggattgtactttcctagttagaaaaggaagtggcacaaggatgagggcagtgaataaggagatggctcagcggaagtatcagggtcctgtaaatagttaacgtgttttatgatcaaagggttctttgcatttttggtgattttgaggcttaatttcctctatgtagttagttaaatatttaacactgagagcaagggcggggacaaggcaaacaacaaaaaaatcaaaatgaagccaacttctgcggggttcccctgccccagggaggtggaggttgaggtagaactgactgagagaatcaccctgcactatgatgaagacacatccacacatcaggactacatagctggcaggccctgactctccagaggagcaaacagcttcttccttatgtttctgtgtctgtcttagtagaaatctgtgcccttggaagaaaaccaaatttgtaccccttgaggcagacactaaccaagtgaattaggtagatgggtggatgggtgggtgaacataggcaggaggtgtgacaggccccagggagggaaaggacactgttcttactgacaggcacacactgccacacctgccctcccaacaaccccgacacagacactgttgttaaccctccttttacagatgaggaaactgaagctaatttgctcatggtaacacaggtaggaaagtggctaagttcagctggagaaaaggaaaattctgaaagactttaagatacatcttattcaaaagcatttggtgaacataaaaaagtacccaaggcataatattaagtgaaccaagcttcttataaagcagtatgagtcctgtgtgatcccaactttataaaaaaagatgcatatgtcaataaatgcacagaaaagggtataccccgaaatgttaataatggtgatctcttgtttatgacacagaattttgattggtctttgggtttttctgtaactttaaaatgttaaacaataaccgtgtattatcttaataatgggggaagtcacagaaaaagtgcttttcaaaaacatgaaataaataagcccatgtagggcctacaggggagtgcagtcacctgggcctcatagggttggcaaaggcaaggatgactgctccaaggtatagccagctcgctggccagcccatctacccatccacctacctattcacccatccacccagccatctacccaccatccacccatctacccatctacctacccatctccctacccatctacccattcacctaaccatctacccatctagccatctgcccattcacccacccatctacccatctacctacccatccacctacccaccaagccatccactcatccacctaaccatttacccatatgcctatttaggcacccatctacctacctatccacccattcaccaatctacccaaccacctacccatccatccatccaccaacccatccacctagccacctgctcattcacctacctacctacccatccacctaaccatccacctagccacctgctcatccacctacctacctgcccatccacctagccacctgctcattcacctacctacctacccatccacctacctacctgcccatccacctagccacctgctcattcacctacctacctacccatccacctaaccatccacctagccacctgctcagccacctacctacctgcccatccacctagccacctgctcattcacctacctacctacccatccacctaaccatctgctcatccacctaaccatccacctagccacctgctcattcacctacctacctatccatccacctagccaccacctgctcattcacctacctacctacccatccacctaaccatccacctagccacctgctcatccacctacctacctgcccagccacctaaccatccacctagccacctgctcatccacctacctacctgaccatccaccatccatctatctatctaatctatcaaatctattttatctatctttctatctatcatttatctgctggtgccttaagcagttatgtttgtagctgcaggaaaccatcctcaaactctttcctcctggggaccaagacagccaccgatagagccctgcccagggctgtggacaggcaccaagcttttctcttggttagctcccccacgtcacactgcctgaaccagtgaccccagcttcccttgtttagaggagccaaactcctctaaacagatgaacagcagcagcaaagaggagtgaacacccctctgtccctcagcagctgggctgctgggctcgagacttaccgggcgcttggtgaggtcccagttgtggatgatcctggccggaatcactgaggcatcgtcttggtggcagatgtcacagtaatagaggccagagaaggcacagagcttgggtcgtacaaaggagaagccgatctgccgggagcagcctggggagatgggtggagagtgagtggtgtggccagagtcagctcctagtaacttgggagctgctgtggtggaaaggatctgctggttgatttttttttaaggtaggcacaaacacaagaataaccaccactcgtatttccaccactcagaactcccctactaattaatctttacaacaacacactgtaagaactatcattattttacagctgaagaaatggatgctcagagaggttaggaaatctgtctggtcacatagtgatgaagtggcatggctggcattcagatctgggtttggctggttccagagcctgagttctgctccactaccccttgctgcctgtgtccggtgtccccactgctggcttggcaatgccagcctcctctaggtccacccctccactcgggccccataatggaagcagcagagtaggggctgtggcaagcagtgaagtagctgggggacagggaccggggtcggggctggcaacagggagtggatgggtagccagcagggggcaggggagcgtgcacagtatctgatgcctcgggactgtggggcagggctggcttcagcccccttggttggaggtgtctccacagccggggccagtgggaatgggagtgggatgtgccctgggcaaaaagcagaggccctgactcaaaccctgaacatgtgccgtaactcctccaggggcaggcagaagggtccccgggccttgggaccagagggcgggctctgctcctcacccgctgcctcaccctgaccttcacctgatttcttcaaggttccatttcagtgactgtaaaattcagctactaccagctattttgtggggttattacaaagcttaaatgagacaaggttctgcaagtaccctgcaaattatgaaatacaacccagatgccagtggttggtgtctgccactgagccatgcctgctgggtagaaaggaaacccaaactccccggtggcacagtcccacccgctggtgggtggcagccatggtgagagttgcccccgcagcattcacacccacaggcgaggaaccctttcttgcaagccctggagtcctggccccctcagagcctggcctccacaggctgaagagcaaagtgtgagtgctggggcaggcgggggagaggtcaagcgaggcttgcaggtgttttctgcaggaagctctgttctgcctagcttctcccatcctcccggggccaaccgcagactgcttcctttcagacgcttgaaacaggcttccctccagtctgtgccaacaggacagctcccaaaccaaggctcagcttcttgctctggccttctgcagcaggacaaccccctcacaggtcacctaagggtcccatggtgatgggatgccatctgcctctggatggtggggggagtgggaggagctaacaatggaacatgggcagggggatgtcactcaaccttgaataagaccctagagggatgccctctagggtcctgcctatgagcaaaggctctggggcctgactgtcagggtcccatttctgcctctggccaggcatggttgctgatatctgtaatcccagcactttgggaggctgaagcaggaggatcacttgagcctaggagttcaagactagcttgagcaacagggggagaccccatctctactaaaacaaacaaacaaacaaacaaaaaaggaaaattctgcctctgccacttactagctgtgtgagctcagtagcagacaccaaccaggtacttaccagctctgtgcttcaatttcctcccctatcaacagagatgataatagtagcgcctatctctacagggttgttatgagacttaaatgagataatccaaataaagcagctggcccagtgcccagcacagaagtattagatttgatgatgaggaagacatagcagatgtactgatttggaataacatccacagtgtaggaaaaaaccaagttgtggaacaatatatccagcattcaacacagcagccaagagccccgtgtgtcccctttaaatgtatgaatttaaatggaaaattcagttgcttaaccacactagccacactttaagcacctggtagcactacatggctcgcagctatggcactggacacacagatctaggacattttcatcatcacagaaagttctattggacagcactgaatagcacgagcccatttttgtaattaaaaaaaaagggtgtacacttagaaaagcagcagaaatatttggaaggaaaccatgcccctgctctgaaagaacaggacagtagagcaagaagaaaatgaagcaggctgggactccctgagcagcgcagtgactagccagcctgtggcccatcagtgggaggtgccaggagagggacgggtgagcagggcccactgcctatgagcagggcactggccccagccggggctggggaggagcagaagctgtagggcaagcctgatctgtggcctcatccctaggggaaggatgggggcatttgcggggaggcagaagggtggggagcctaaatcaggaaccagcaggaggcggagtgaggctggcaggctgggggtggcagcagagcaagtcggcacctgcgcagaagcagccttgggagtcaaggcctttctccatggggatggccaccaggtactgcagcaggaagccattctcccgggtggcaaatttcagcacctcctgacagttttcatccaggctcccgcccagggtcaccgcctcctcggctgtctccaagtaggatgccaggactttgcggaccagatccctccacagggcggcttcctcggcgtttccggcctgcagcttcaggacagccttggccgtgatgattttgaagaaggatgggcccccaaggctggtgtctggcaggatgtcccggatggtctccacgccgtggctgtcactcagcatcttctcattgttcctgatgcggaaacatttcagagcctccaagggcagagaaaatatatagggcatccaggtcctgtccatgtacaagtacagcagggactccttgatggcatctagctctggaacctgggcggacgaccagtcagactgtgtgccctggagggccgcgggctccgagagcaggtctgagggagagaggcagccctggggcgcctcggggggttcctcaggctggtctgagtactgcacgttcacccactcatcctcctgctgaggccggaccttctgcagggcctcccgcaccaggtccagccagtcctcagcttcgtcctgggaggaggcgcgcagggccagcttcttgccagagaagaccagctcaaagcgcccgtcactgtgggctggccccacagactcacagcgaagcagggagcagttctccacacaggtgtgctcctcgttgctcaggtagaggcggaactccagtggggagagctcgcagaagagctccttccagatgcccattgccccctgccgctccacggtgcccagcttcatgagaccctggaatgggttggacagtcctggaggcagaggcaaaaaggggcacattagttggcgggcctgtctctgtcctgcccaaggcagcctctgctgcctgatgccctgcagtgcatgtggccagtgactgtccccagaacacaggccagccacggggcactatcacatgggaccctgaaagctggatgggaacatccccattctcaccgtccactgctgctcttgcatcctgtatttcactgagaaaataagagcacccaaaagatcacctccacacgccctgttccctacacccacgccttccctcctgttgccagggatgaaccaagtgtgcttctttctgcgtgaggccaaaccctccatttgtgcaggaggtctctcccttggccaactactcaaggacaaggagcagtccttctctcctctgtcgctgctttcttccttctctatggggtgactcccatcggcacacatgcacgctgtcatttctcccatctttagaaatacctctcatctccacgcacttccctaatgaccaccatgtttctcaggcccctttacagaaaacctgtttgaagaggcatcaaaactgttcatcttggccggaagcggtggctcacgcctgtaatcccagcacttcgggaggctgaggtgggtggatcacttgaggtcaggagtttgagaccagcttggtcaacacggtgaaaccccatctctactaaaaatacaaaaattagccaggtgtggtgagcacctgtaatcccagctactagggaggctgaggcaggagaatggcttgaaccggggaggcaggggattgcagtgagctgaggtcactccactgcacttcagcctgggtgacagaggagtgagactccgtctcaaacaaaacaaaaaacctcttggtctctagtttccctgctcccattccttctcaaacctgctccaagtaggcttctctcccctcattctactgacactgcttctgagatggtcaatgccctcctcgttgccaacccccaaggccactcctcagccctcgcccccacccttctatctctctggctcggtcctccctgtggcctctcacgttagagtgcccagatgtcagtcctgggtccttgtctcctctctgtagatgccactttctcaccactctacctgctctcaggctttagctcccaatttttatcgccagcctggaccttgttcttgaaatccacattcatatatccacctgtgccatacatgtccactaggatctcagctgacatgtccaggatgaattcctgctgccagcctgcttcctcctgaatggtcctcatctcaccaaatagcaaaattcatccttccagatgcttgggctaaaaatcttggtgttaccccaggttttctttctttcgcagcctacatcagcaaatcccattggctctgccttccacacatccggaatccccgcctctccccagccgcaccccacccactgtcatctctggcctggcttgtgatgacaacctcctaactggtctttctccccttctccccgtagtccctcaacgtaggagccatcatgacccatttaaagggaagtcagagcatgtccccctgccccaaaactccacagtggctgccatctcccttagctgaagccaaagtgcttccagtggcccacaggcctcgtcagattgacctcgtcgctcactgccacacccccatctcctctctcctgccactctggtctccactgtccctggatgtgtcaagcgcagccccagcgcagggtctttgcatttgttctccttgcttgaaacacgtacattgcctcatgactccttccctctctcccctcgcatctcctcaaacatccccttattggtgagggcttttctggccatcctatatgcagtggtccactctctacctctgtagacaggtagagatttactgtcctccatagcacttattaccacctgaccacacactatgcttacttgttaattttatttcccgtctcctctactagaatctaaatcccatgaagacagggccactgctttgctgcctgctatgtccccagcacttagaacagtgcctggcacatcacagagcctcaataatatttgctgaatgaatgagcaggtgagtgcctatgtatcacatgttgcccaaagctccctgctgcctggggtgtgacaacaaccagagtgtccaaaggacacacaattctctctccgccagcctggaatagccttggagatttcacactattctatgggggttccctacccctcaagaaacctgatggcctagacctgaagcacagcttcgctggcaggttagagaccacagccatcacacgggccgacagacaaacctaacagaagccagcccggagactgggctctacccacacaacccatgccagggctacccacagcaaggccccctgagctgggcaggattctctgctgggtcactgcaaacagaaaatgaggagagaaagagaccaattctagagcgtactttttttgtttgttttgaagaggaaacccatcatgagggttactgaaaaatttggttatggttatttaaggctttctggaatttcagtgtgtggagatcaagctgaccttgctgtaaaaagcactggggaggtcgggcatggtggctcacacctgtaatcccagcactttgggaggccaaggtgggtggatcacatgaggccaagagttcagaccagcgtggccaacatggcaaaatcctatgtccactggaaatacaagaatcacctgggtgtggcagtgcatgtctgtaatcccagctcctggggagactgaggcacttgagctgggaggcaaaggctgcagtgagctgagattataccactgtactccagactgggtgacagagcaagactctgcctcagaaaaaaaaaaaaaaaaaaaggaagcactggaggacattaaacaaatagcagatcctccagcctggccaacatagcaaaacaccatctttattaaaaatgtaaaaattggccgggcgcagtggctcatgcctgtaatcccagcactttaggaggccgaggcgggtggatcaccggaggtcgggagttggagaccagcctaaccaatttcgagaaaccccgtctctactaaaaatacaaaatgagccaggcattgtggctcatgcctgtaatcccaactactcgggtggctaaagcagaagaattgcttgaacacgggaggcggaggttgtggtgagctgagatcacatgattgcactccagcctgggcaacaaaagggaaactccacctcaaaaaaaaaaaaaaaaaaaagcaaaaattagccaggtgtggtggcaggtgcctgtaatcccagctatttgggaggctgagacaggagaattgcttgaacccaggaggctgaggttgcagtgagcagagatcatgccactgcactccagcctaggcgacaaagggagactccatctcaaaacaaacaaacaaacaaaacaaatagcagatttgatcaagccacccagagctgttacataaaccaactactgagggtaaacacgtttggaaggaccatttaaaacacctggggcttcatggggctggatgtgctctgagctacaggtggaatcaagagttttctataatcataaattgcatagttttcagggaaaatattttcctatttgactggtgaaacagtatttttgtcctctgtaggcagttttgagacaatatactacttttcctgaaatgcttccctgaatgaacatgattatgatggcattctggaatgaggttttataacacttgtgggaacacactacccctttagcaatggaaaacagaacttcacagctgccttctgaaaggcctggtccctgcagatgggacccacccgggaccctcctggtcacctacccatctgcctccggtgtaccacctggaaactcttatgcccctgggatggggctgcctgggcttgccttcttcctggggaaggtacacacgcttggtctaacgcccccagggagcagttttttcttggttcttgagaaaaatgcctgtggagaccaggccttgactctggagtccccctgtaagaagctattgggtggtctgaagcactcttcaggggttgctcccgggaaggccggtagaagtcatcctctgagatccagctcttgtttttctgttgggaaagaagacaacagttgtttgttttaaagtttttttgttttgagacggagtctcgctctgttgcccaggctggagtgtaatcgcgcaaccttggctcactgcaacctctgactcctgggttcaagcgattctcctgcctcagtctcccaagtagctgggattacaggcacccaccaccatgcccagctaatttttgtatttttagtagaggcggggtttcaccatgttggccaggctggtctagaactcctgacttcaggtgagccacctgcctcggcctcccaaagtgttgggattacaggtgtgagtcactgtgcccagcctgaagtttttttttttttttttaagtctttatctagatatggctcttatatcataaaattaacccacttaaagtatgtaattcggccagccatggtggctcacacctgtaatcccagcactttgggaggctgaggtgagaggatcacctgagcccaggagtttgagaccaacctgggcaacacagtgagaacccatctctacaaaaaataactagctgggtgtgatggcacacacctgtagtctcagctactgaggaggctgaagagtgagaatcgcttgagccagggaggtcaaggctgcagtgagccgtgatcacgccactgccctccagcctggttgcagcctaggcaacagaatgagaccccatctctaaaaaaataaataaataaagtgtccaattcaaacattttggcttagtcagagttgggcaatcgtcaccaccacctaagtttagcaaattttcctcacccaaaatggaaaccccatacccattagccatcatccccatttcccctggccactctcagctctaggcacctacttatctactttcggtccctacacacctgcctgttctggatatctcatatagatggaaccatatgacatgtgaccttttgtgcctggcttctttctcttagtggaaggttttcaaggtgcatccatgttatataagcatgtttaagtgttcattcctttttattgccaaataatattccattgtctcgatccaccacatttggcttatccactcctcggctgatggacatttgggttgtttctactttttgtcaattatgaatagtgctgctatgatcacttatacacaagtttttgtgtagacatgtttcattgtcttgggtatatacttaggagtagacttgctgggtcatgtgtaactctatgtttcccttcttgaggaactaccaagctgttttccaaagtggccgcaccattttatattcccaccagcaatgtacgagggttccaatttctctccttgggaaatctatccaaatccattggaatctactcaaatccattgtctgtcttaaaatggggctgtctttttgttgctgagttgtgttgtgggttgaattgtgacccccccacaaaaggacatgttgaaaccctaccccccagtacctcagaatgtgaccttttttggaaatatagtctttgcagaagtaattagttaagatgaggtcatgttggagtagaatgggctgttcatccagtatgactgatgtccttataagaggaggagaaaagatacacaaagagaggagaacaccaagtgaagacagagatacagaggaagaacttgtatgacagcagaacatgtgtgacagcagaggggagaccggagtgacatgtctacaagccaaggaatgcaaacgagcacctgcaacgccaaaacccaggagaaaggcgggaacagattcttccttagattctccagaaggagcctccagaacgatcagagaataaataccagttttgttttgtttttgagacagaacctcactctgtcacccaggctggagtgcaatggtgcaatctcagctcactgcaacccccgcctcccaggttcaagcaattctgctgcctcggcctcccgagtagctggggttacagatgcttgccaccatgcccggctaatttttgtatttctagtagagacaaaaccttgtcggccaggctggtcttgaactcctgaccccaggtgacccacttgcctcagccttccaaagtgctgggattacaggcgtgagccactgtgcctggcctattttgttttgttttgaggcagggtctcgctctttgcccagactggagtacagtggtgcaatcagggctcattgcagccttgactgcccaggctcaagcaatcctcctgctttagccccactgaatagcagagactacaggcatgcaccagcacgcccagcaaattttttatatttttagtagagatggggtttcaccatgttggccaggctggtcttgaactcctggactcaagtgatccgcccacccttgcctcccaaagtgctgaggtcacaggcatgagccacctgcccagcaatgtctgtttttgttttttgttttgttgttgttgagacagagtcttgctctgtcgcccaggctggagtgcagtggcacaatcctggctcactgcaagctccgcttcccgggttcatgccattctcctgcctcagcctcctgtgtagctgggactacaggtgcctgccaccacgcccagctaatttctgttttgtatttttagtagagacggtgtttcaccatgttagccaggatggtctcgatctcctgacctcatgatccgcccgcctcggcctcccaaagtgctgggattgcaggcatgagcgactgcgcccagccaatgtctgttgttttaaaccaccctgtgtatggtactttgttatggcggccctagggactaattcaagttgtaaggtgctttatatattctgaatacgagacccttatcagatttatgatttgcaaataatttctcccattctgtgaggtgtcttttcattttccggatggtgtgccctctggagcacataaattgttagttttgataaagtctagtttatctatttttgttgttgtttttgtgcttctggtgttgcatcttaaaaaaccattgcctaagtcagtatcacaaagattcacttctgtgttttctgccaagagctatatagttttagctcttacatttaggtttctggtccattttgagttagtttttgtgtaaggtgtaaggaaggggtgttattattttgcatgtgggtattcagctgtcccagcatgtagggtttctcagtcctgcttttgggtttgagatgagggagtcctggcgagcaggcctcagggtcctcattggccgcctctgtctctgccgcccacttctgtgcaggcccctgcgaccccaggcagccaggccctgccccttcccttcgttgttctcttttgaatctgaagctgctcattggctggggaagatggggttgcggggagcatctggggtgagtgggcttgtgggagtggattctggttccttttctccagtatttcaagtcctccctggcattctgtgcctcaacatggaagggcagaggcaaggaagctggctgggccaactctaagtggctgtgtacacagaggaaatgagtcacacaagcagtgggaccagccccgctgttttgtgaagtgccactaacctcaccctgacatcgctatttccagtccctgaatcaagagtgcactccctgctttgtaaacagggaagggttggtttggacagttggatccattcagatgctacacgactcctcaagccaagggtggcaagttctgactcaggcaacttgaggggtggctcacagaactaggtccccagagactcctccatggggccttcagaattggcaggtgcttcccccctgccagtgacagatgatgtgtcagtcagggcagccactggggaccatccacaacactagattctgagcaaagcctgcctaggtcatcaagaactgggggacctccctgaggaaaatgggtgggagaaacagctccctggcaaccatgtggctgtcctggcagcctcacatatacctgggaagttgtgtgatctccagcgcctggtgggagagggcactgtccctgaagactcagctcaggagacatccatcgcctctgcctggaagcttctctcacccttccccagcctccaccccttcccaccccctagctgggttagggcccctactgggatcccacaatattctgtgcttaccctcattctagcatctataaggctgtttggaatggttttcttgatatctccagcaagtgcctgccagagtcatacaagatgagggaataaatcatgaccatcccaatgtctttaacataaaataacaaaggtgggtcaagtggactggaaggaaggagacaaatgtaaattttaagattatggacattcagaatgggcgtgatggatcatgcctgtaatcccagcactttggggggccgaggcaggaaaattgcttgaggccagaagtttgagaccagcctggccaacatggagaaaccccatctctactaaaagtacaaaaattagctgggcatggtggtgcatgcctgtaatctcagctactcgggaggctgaggcacaagaattgcttgagccttggaggcagaggttgcagtgagccgagatggatggagctattgcactcccacctgggcaacagcgcaagagtctgtctcaaaaaaaaaaaaaaagtttatggacattcactggggaggacttctctctcctttgaggaaaaacactactaggaaatgttcagacacagtccattgagcacagctgccaggaaatgaaactagggaacatcttttactctcttaagcaacagggaaaaaacagtggaaatgcaggttcctcggagcttctgcacatgggcctggacagagctctgaggctgtgtgcccctggccccaggcgggtggggagcagagagagggtgtgagagagagtgcacgcatgaacaccactgtttctctcttctctcctttttttcttttagagatggagtcttactctgttgcccaggctggatcacagtggtgtgatctcagctcactgcaacatttgcctcccagtttcaagtgattctcctgcctcagcctcctgagtagctgggataacaggctcacgccatcatgcccggctaatttttgtatttttagtacagacggggtttcaccatattgttcaggctggtctcaaactcccgacttcaggtgatccacctgcctcagcctcccaaagtgctgggattacaggcgtgagccaccgcacctggaccccttctctccttttttcccaccaccttccgacaacctgctcactcagggtccatgtctggccagcaccctgccctttaacagtggagagaaaccatcaccgactaaggatctataccagagctgcaactgccaccagggacccaagacagagaaatgccaccttgcgttactaaagggctcatgacaccatatacaacagctgaatccccaagaggaatgtggctgaggagtgagacgaaggtctctgggacactttcagaaggatgagactttgtccagccagtcctcattatgccaggcaaaggaactgcctgtactcataactgtggaaggggaaccacataccatgggcaggtggtccatgggggcagtgattaagagcaagtcctagaactcacactgccttttgggagttaaactgaaaccaactcacaacccccagatcccagacatgcgtcacccttgagaggcccctattccctgcacctctccttcccagtgcttagcacaagtgtaattatgatgtggataatcatttgtctaatttaatgtctgtccccaaagagcctttgtctgtcctgttgtatcactctacccctaggacctaacatggtgcttggcttatagtaggtgctttgggttcaatgaattaaaaataaatgtttttaaaagaaagactgaatgggcctctacactataaaacttgacagtgaccccaacatctcccccaaaataacatcaaataaaaagcacgtggctaactgatagaagtatagaaagatgaggaccacaggggcagatatgcagggcacagcctggcactgtccacaggccaggagcccagcaggcccacatgagctggcaggctattcagtggcacctggtgactacctactgaataagcagtgaatgaatccacaacttccctgtgagacagacacaggacgggggcaggatccgagattctcacatcggactcagcaccaagcgcttagatgtcacattcgctaagcaaccttccagcaatcagagtcccctgtagctggcacagaggcagagcctgccatgatcacaccaacctgaccaccctgtccactcgatggtacacttcgctgacccactttggcctcccaaattgctaggattagaggcgtgagctatcacgcctcgcctgaacgtccataatcttaagtttcacatttgtctccttccttcaagtccccttgacttatctttgttattttatattaaagacattgggatggtcatgatttattcacacatcttgtatgattctgggccaggtacttgctggagataccaagaaaaagaaccattccaaacagcgttatagctaggatgggggaacaaaataaacttaggaattggcatctcaagagtctcttgggagttcaagaactattcatccatgcctactttctcccaggtacagtgcttggtgctgacaatacagaagtgaacaggcctggtgctctgtatcatagagctaatattctagtaaggaagacagaaaataaacaaggagacaaagagataatatactgtaattgcacatagtgatgagtgttataagcgaagtcaagcagatgaatgggacagagagtcactggggatggtgcttttgagctacgggggtccggtcagggaaggctgagacaacaatgaagtgagtcgggaaagaaggaacagcaaatgtaaaaccctgaagctgggccgggcacggtggctcatgcctgtaatcccagcactttgggaggccaaagtgggcagatcacttgaggccaggagtttgagaccagcctggtcaacatggtgaaaccccataattttgtaaaaatacaaaaattagctgggcatggtggtaggcatctgtaatcccagctacttgggaggctgaggcataagaataagttgaacttaggaggcggaggtttcagtgagctgagattgcaccactgtacttcagcctgggtgacagagtgagactctgcctcaaaaaaaaatttttttttcaaagaagcctgatgttggaaggagttcgcttggactacagagctgcaaggaggccggtgggtcagagcttagtgagcaaagatgctattctgtcccaccagctttgaggccctggcaagataagatgcctgagcctgcaaagcagaagctagaccatgggcaggagtgaactcaacatgcttagtgccactctggagtcctgtggggcgcacagcctgcatccccagcagacgtcactctgcctccagcttgaggaaggggctgcagagctttcctcttcagccttcagcttgagttggcaggtgcacagtcacaaccttcagggtcctagagcattcattttcaggaagtaaatcttcaggatgtactgaagcatcttcaggatagcaaattcgaagactctgacccacactgacggttttgtgatttacatggtcatattcaagaaacagagcgaggccaatcagatatccatatggaaaaatatgaggtttgacttctaacaccacacataaaaattaatcccagaaagatcataaacctaattgtgaaagataaatcactaaagcttctagaagataatataggcaaataccttcagatccttggggggagatgagtatctcttaaatgggacaaaaaccaagcaaaccataaacaaaaagactgataaactgcacatcattaaaagaacctctgttcaataaaaataccattaggaggtttaaaagtcaagccctatagactagaaaaagatacttgataaatatagtttttgtccaatgaaagacttatatctgtaatatataaagagttcctacaaatcaacacatacacatacaactcaatttaagaccagaatgacaacttggacagacattctataaaagaggattgactggccaataagcaaatgaaaaggtatcatcatttagtcatcaaggatatgaaaattaaaaccactacacatctaccagagtggctaaaattaaaaagattggtaacaccattggccaggataaagagcaactagaatgctcatttgttgccaatatgagtataaattagcacaaacactttagaaaactgtttggtggtggtatctattaaagctaaacataagccacccaaggacctagcaattccattcccaggtatatatacccacagaaataagcaccgagtttctccaaaagcatgtatgagaatgttcactacagctttcttcataatagtcaaaacctggaaacaacccaaatgtccattaacgggagaatggataataggttgcgatatatttttacaatggaatactgcagaacaatggaaaagaattaactacagcctcatgctatatgtacagccacacaccaccatgcccagctaatttttgtattttttgtacagatggggtctcactttgttacccaggttggtctccaactcctgggctcaagcaatcctccctcttggtctcccaaagcgctggggttacaggtgtgagccaccatgcccagcccccaaatattttcattttaacttgtaatccataaaaatgagattttctattcttttatcatactaagttattgaaatccagcgcttatttcacatggcacatctccatttggacttgccacattttaagtgtacaacagccacacgtggcttgtagctgccatattggacagcacggctctaaaacctgggtcatgttgcaaagtgagtatgttcaaggcctagtattttctaaaaatattaatttaataggctgagtgcaccagctcatgcctgtaatcccagcacttcaggaggcccaggcaagaagatcgagaccagcctggccaacatggtgaaaccccatctctactaaaaatacaaaacttagccagacatggaggtgggcacctgtaatcccagctactcaggaggctgaggcaggagaattgcttgaacccaggaggcgaaggtggcagtgagcagagattgtgccactgcattccagcctgggcaacagagcaagactccatctgaaaaaaataccaaaaaccaaaaatcaaaaaatattaatttaataataacaagtactaaggaggaaatgaaggttcagagagctgaagtgacttgcccaaggccttatgctggtgagtggtagtggttaaagagctgagactgcggtcagactgagaacgaccttcacaaagtgacgtgaaaatgacaggagatacacacgggaagtgatcagcacagtgccgggcttatatctatagctcacatgccaagaaacagccgggcttatatctacagctcacatgccaagaaacatgagccccatcatcatgatgctattaacactatcactatgcagggagaggaaggctaacagggagaaggcagagaccactcagggtcactagctggggaaaccctgtgtcagctgacatttcccaagaccgccccctgaacggcttgcaccactcaccggactggtgggtgaggaaactaccagcttcagaccagctccgtcatgagcctgggccttctgcaggccattcccttggcccacttctctggctgtctcgctgacagtactagaaggctgctggcctgaggtgctctctacaggctgctgtaagtccagggggctgggcgcctggggatgcggctcctgcacgtggacaccatcttgagttccagaggctgcctgggcaggaaggggctctgcaggtgcctcacagtgcaggtgtgtgctggtgttgaggccatggagggagagttaggcctgtggtgtggggatctccgtttcttggctcagtccgttggttggcacagtttacctgggctttgctgaattccaacaataccatagaagttttaaacaaagaaacctgtgtgacaggttgtctgcgataatgcccaaggcaactggggcagagggaagaatgcaaaactgctgttttatgatttaaaacaacccacaccctctaaatgatccactgcactccccctcacacagtcctcctctgacactcccaccacgtttttcctggccaggatttaggcagactgcgtggacaggtgatgtgtggagcctgggatctcaggcgaaaaagctccccagcagaggaagaggacttggtatgaatgaggacttactggcattctgagcaggctagctgtgggcctggagagcttgctcagccaaacacatggttgtgtgggcaatcgtttccccaaacatggtatgcagcagagcctcctcctccacagcacagggagtagagatgccaggactctgtgccctggggcagggactaggagaagcgagggctaggcaggtttcctaagcgaggtcatactttgttcctgtgcaggcactgggacagcaaggggaggtgcaagggctggtcccctcagagctggactggaggtggagacagagaagcttcacatccccagaaactgctgctggagctcaatgtataccaggtgtgtgagggtggatatgagtacacacgagatgtgcccctgctcagtctccatggtgggactgccactccctgtctcctccgtgctgcttcctggggccacagggagcaaatgttactgccttggtacacgtgcgtgtacaccacactcacacatacacactgcacagaaacatgccctgggccctctggaatgtgcactgactagcaactgctcctccctctcctgaggcttcttctgaggatccaagctccattttgaaaataaacccgtttgctctctcttctgcttataaaaccagtggagcatgtcatgggcaaagcctggttcaggtggccacaggctgtctaaggccccaaagcctccctgcatctgccctgatggcttggactgggtccagaagatacatgaagctctgcttaatttgggcttatggaaatgaggattttagaattcaagttgcttacctgattgtctttccagtgagctctgcaccatcttaaccccaaacaacatttcaagacattatcgtcaagaataggtggccaatccatacatgtataagtaactgattttggccgggtgtggtggcttacatctgcaatcccagcactttgggaggctgaggtgggtagtagaaccacaagatcaggagttcaagactagcatggccaagatggtaaaaccccgtctctactaaaaatacaaaaattagccaggcttggtggcaggcgcctgtaatcccagctactcgggaggctgaggcagagaattgcttaaacctgggaggtggaggttgcagtgagccgggactgtgccactgcaatccagcctgggtgaaagagcgagactccatctcaaaaaaaaaaaagtaactgattttcaacatagacaccaacacattttaatggggagggaatagtcttttcaacaattgtgctgagataagtggataatcacatgcaaaagaaaaaagctggactgctatctcacattgtatacaaaaattaactcaaagtggattaaagacctaaaggtaagagctaaaactgtaaaactcttagaaggaaagagaggtataaacttcatgtctttggattaggcaacggtttcttagatgtgagatctacagcataagaaagcaataaaaaataaattgtaatcccagcactttggaggccaaggcgggtggatcacctgaggccaggagttcgagatcagcctggccaacatagtgaaaccctgtttctaataaaaatacaaaattagttgggggtggtggtggtgcgcacctgtaatcccactacttggggggctaaggcaggagaatcacttgaacccgggaaggggaggctgcagtgagccgagatcacaccactgcactccagcctgggcaacaaagtgaaactctgtttcaaaaaacaaaaataaaaaacgtttgtgtggttttttttttttttttttgagactgagtctcactctgtcgcccaggctggagtgcagtggcgccatctcggctcactgcaagctccgcctcccgggttcatgccattctcctgcctcagactcccgattagctaggactacagacgcccgccacaacgcccagctaattttttgtatttttttttttttagtagagatggagtttcaccgtattaaccaggatggtctcgatctcctgacctcgtgatcctcctgctttggcctcacaaagtgatgggattacaggagtgagccaccgtgcctggccaaaacgtttgtgttttaaaggatactatcaagacagtaaaaagacaattcaaagaatcgggggaaatatttttaaattatacagaagggcctattatccagaatatacacagaacacttacaaatgaacaataaaaagacaaataactaaatgtttaaatgggcaaacgatctgaacagacatttctccaaagaagatatccaaatgtttgataagcacatgaaaagacactcaacatcatcagtcatcagagaaatgcaaatcaaaactacaatgaaataccactttatacccactgggttgattgtaataaaaaagacagaaaataataagggtggcaaagatgtagagaaattaaagcttgtatatattagtggtggggatgtaaaatgacgcaactactgcagaaaacaatttggtagttcctcaagaagttaaacatagagttacatatgacccagcaattccacccctaggtatgtaactaagagaattaaaaacatgtctacccaggctgggcgtggtggctcatgcctgtaatcccagcactttgagaggctgagccaggcggatcacctgaggtcaggagttcacctggccaacatagtgaaaccctttctctacaacaagtacaaaaattagctgggtgtggtggcaggcccctataatcccagctactcaggaggctgaggcaggagaatcgcttgaacccaggaggcggaggttgcagtgagccgagatcatgccactgcactccagcctggggacagagcgagactccgtttcaaaaaataaataaaatattgaataaaataaaatacaacaataccatcgattgagcactattgatgcctctgtgccagggaccattctaagtacttaaatctaagtacttaaaccctccagactatacctatgccactcagtgatgattataatacagatccaatctacacagaagaagctatttaggacagtcaattcactaggccaactgcaatttggtttctgccaaacagaaccgatttatattaataaatttcattttgaatgttgtgtcttttatgcttttctttatgtttgatttgtggatgttttgattttatatgtgtaatgataagcacaaggaatttatgtctaatttaaagttacaaatatttaaataatgtaataactttgatgaactctaagtgtcagtgagaacattttacccttgaaatatacacttcaagaaatgctggtctctgtggatgctcaaggactaacttcaaggcccagctctacgaatgctggtgctggctgtgtgtttgtgcatctgtatgtcttacatttgccagttactcacaccactgtccggcatttgtctatacatcctgacccttgcccctccagtttctccataatagccgggacaacacttcctgcacagagaggatggtcactgattcagtgaccttaagctggaattttccatcacaagacacatgagataaaggcgagacatatgacaaggggatggctggctggtctgcagaggaggcagacacacaggaagggctaagacaggtgagtaaacctaggtcatgccctgtgctcgggacacactgcaggcctgtcatgccatggtcccagtggtcacaggaggcagagactgttcctccccaatgtattctatctaaattcctccatttaacatttgaaaactccacctaatgtgctcagaagccatttctgggcctacgagacaatctcctatattgtttgactaacaagcaatgtgcctgaccttcctgggcttgtaagtggtggaacaggactcgaaactaggtctgctccaagcccagtctgtaacaccacccaatgctggtgctctttccatgctgggtgagaaccctggagggacctgaaccaaggcgagggcacagggccagtggaaagaaggtcccaaacacgtgggaccttcttttccgctgatgcaacatggatccagctgaaggaggcttttaataagaagttcccattttccacctatcagatgagcaaatatccaaaagttcactaataccatcagttggcaaggctaagaaacaaggacattcctggtggagtgtaaatgggcaataatctgtgaacattccatattagtctatccttttgctcggcaattttgcttctgggagtttatggaacagagatagctacgcagaactaaaagaccacatacacaaggttatttatgaaaacacaggccccagcacccattaaatactgggctgattaagtaaactaaggtacattgatacactagaacaatatgcaatagaaaaaaaaagaatgaggctgagcgcagtggctcacgcctgtaatccccagcaatttgggagcctgaggcaggaagatctcttgagcccaggagttcaagaccagcctgggcaacacagtgagacccccgtctctataaaaaataaaaataaaagaatgaagaagctctgatatgaaaagatcttctccaaaacaagatatagaacagtgtgtatatactgcctttgtaggagagaaagtaataaataaggaagacattttaaaaatcttgtttttttttttgggacagagtctcactctgtcacccaggctggagtgtagtggcacaatctcagctcactgcaagctccgcctcccgggtccacaccattctcctgcctcagcctcctgagtagctgggacttcaggcgcccgccaccacgcccggctaattttttgtatttttagtagagatgaggtttcaccgtgttagccagaaaggtctcgatctcttgactttgtgatccgcctgcctcggcctcccaaagtgctgggattacaggcgtgagccactgcgcccagctgaaaatctttatactggtatttgttgtagatgcatttagaaatttggaagaatatacaggaaattgattattatggttttaggggtgggaggaaagaacagggtagagggagaacaggaatgggaaaggctttcactgtatatgttttagatttttttttaaccataaaaagattatctatgcaaattttttattttatttatttatttatttatttatttatttatttttgagacagagtcttactctgtcacccaggctggagtgcagtggtgcggtctcagctcactgcaagctccacctcccaggttcacgccattctcctgcctcagccgcccatgtagctgggactacaggcgcccgccaccatgcccagctaattttttgtatttttagtagagacggggtttcaccatgttagtcaggatggtctcaatctcctgacctcgtgatccacctgccttggcctcccaaggtgctgggattacaggcgtgagccactgtgcccagctgcaaaaaaatgtttaaaaggctgtgtgaagaaggctctgcccagttctctcttcagcctagttcatctgccccacatactcttccacacatctgtctgtccccacctgtccaccacctcctgcatgcagcactcaggtcctgtgtcccccgggaggtattctgtgaagtcacactcttatgcgttatgtttcatctatttgttggaagttttaaatgtactctgacctattagtttccttccttctagatgaagacaacaatattttacactgtgccttgtagagactaagtatcttgtttttttgttgttattgtttgttttcagtttttgttttatttatttatttatttatttttaatttagaggcaggatcttgctacattgcccaggctggcctcgaactgctgggctcaagcaatcctcctgtatcagcctcccaagtgctgggatttcaggcatgagccactgcacccggccaagtaacttgctaaaagtcaccggggcagagctggagcccaaaccagctctaagctgttctaagtccactttctccactatgcctgtattgcctgctacagttcccagctactccagtccctggagaagtcgatgactcccttggctttctttaattactaatagagttcagtaacagacaatcacatgctatgggaagaaagggaggaggagaggaaagaaaggagtgaagagagaagatgggaaggagtgggggcagggtactcactcttgcagagactggtctgagtcctcagcatttgctgtgcccaggtctgagtcataggacatgggctcctcgcaatggtctggactcttggagccattctcttggagtaagcagctatcagagtttaggctgcaggacagctgggatgaactggccgtgtccaggctgagggaggaggcagtcggcttctggttcctccgtatcttatggcccgagtgatggacttcgatgtcttcagagcctgaagaatgggaaatggaatccagagattccttccgctgtagttctgcaccagaggtagagagagggtccagctcagaaagcgggcaaagcccagacagggccagtggggtgagcgtccactcatttaagatggcagacttgtaggagagttcgaaggacaaggacatgaggccctgcaggaagctaaggaggaactcgccctcctcagcatcccggagcagggcggtgggctggtagtactcacgcaagcgggcctgctcctgcagcagcagcttcaggtagcactccatcaggccattgttcagggccagccgcagccatgcccggcagcggcccacatccatgttgacaaacgtcaggtgctccaactctgagatgatgtgtctgggaagggagaacagacgtgtttcaagaaactaccccaaatcacagagatgtgcttttatccactgatgagcaggaaccaggagtaactactgcaaatagatacaggcatgaaaaaatattgggtaatagtgttttaggccagatgtggtggctcacacctgtaaccccagcactttgggaggccaaggcaggtggatcacttgagctcaggaattcgtgaccagcctgggcaacaggacgaaactctgtctttacaacaacaacacagccagatgtggtggcttgcacacgtagtcccagctacccagctactcgggaggttgaggtggaaggatagcttgagcctgggaagcaaaggtcacagtgagcagagattggaccactgcactccagcctaggcaatatatatatatatttatatttatatataataaatatatataaatataaattatatatatttatacattatatatatattttttgagattggaattgtgaaagataatttccatgttcattccaactaccacggggcccctgacacatctgctcatccaaggcatgctgtcagagctccttaagtgcaaggtccttggagcaatgaagatgcagggtaaagacatggtccctgccctcaggcacaaggaactgatgaaaaaaggcataaagggtaggaaatcaacaaccctgtaagaggattggggagcgctccaattacagcatgtggcagaaaagtgggtggtttggttgcaaggccaggaaagagagggtcttaaatatcaaatcaataaggcaacaaggggtaatggccccacacccagctgtgcaccagaatcccctggggaacttgagcaggatacaagttctgggaccccaacctagtgaatcagtctccaggctagcatctgggagcctgtaggctacagatttttgtttagaaaagtgacttgaccacagtcatgcagactgcagggtagatgttctgcataaggagatcagaccccaggtgtaccaaactcagtcccagaatgcctccgtctgatgtacatgcccctctgagctaccacagtccctagcgcaggtttatctcctccatgggaatgtcgaccgcactctactaggctcagtgagtaagctccagggagcttcagctcagtaaatgttgaccagatgatggactcaaggaaagacagagtgagataagggggaacaatcgaaagccagtgtcacccaggaaagaagaacgtgagacaaggcagtggcaatctgcatggaaaggaagattagagactgacaaggcttcttttgggctgaagatggcatttagtagtcctcagaggcacagtgccagctacttgctcaaaagcccagacagttaggggccaaagagataagtgtctccgggtgaatattcatatgcttttcctgattccactctttaataaaaataaccccatacctccttaagagataacattaatggctgggcgcggtggctcatgcctataatcccagcactttgggaggcggaggtaggcagatcacaaggtcaggagtttgagagcagcctgaccaacatagcaaaacccttctctactaaaaatacaaaaattagctgggcgtgatggtgcgtgcctgttgtcccagttactcaggaggctgaggcaggagaattgcttgaacctgggaggcagaggtgccagtgaaccgagatcgcgccattgcactccagcctgggtgacagagcgaaactccgtcccaaaaaaaaaaaaaagatttacaattcggatgtttgaataatctaaggcagggtcagcaaatctaaggcagggtcagcccgtctgtaaagggccagatagtaaattcttcaggctttgcaggccacacaacctctgttgtaactatgtaattctgccccagtgtggcaaaaaaggctgttcctgctaaaggtggccagtctcacctgttttttgtgaccagtctcaaagcagccacaggctcttgcctgagtgctgagggtctcaagatctgctggcacactggctgggaagcttggtctagagataagcctttctagaagacactttcaacccctacctcaccctctctctatgctagaacacagggcacctctgttggcttcctgaacagccggggaggaaaagccaagtgtcccatactctgctgctcctctgcaaagcaaaacctctccagctaaatctcacttgggggtgacagctttcaggaggggccagaagacaggctggggcagaggcttctggtgggcacttttcttcctttttcctccggcctcagctcggatgtgcttggtgtgcaggccatggataaatacggcctccagggcgctgcacatggtgttggcatctccgtcttcactagtgaccaccatgtccagggacacgtactgcttttgcaaggctttcacggatcccaccagcttcttcttgatgacctaggcagcaccacacagaacacaggcctttagcagaaaatcctatggagagtccctagagtgtaatcctttagctggtgccaaatatatgtgcaaccacatgcacacacacctatgtgtgtgtctgtagattccttctgcaaaattagcacattgttaactacagcaaagaaagataaagcatagagaagaaaaggaaaatcacacacactacccagagataattactgttattgttgtttcatatgtcctttagtgtagatactttttgttttttagaccaaacttaagtgaacttagagccatataatcttgtgtttaaatattggccccatcatagctgcagtgatgggagcttgggtaaatccatctaggacaaggttggggcttcccaccttttttacatggacaagcttctgtagagaatcaataagccaagaggcaaaaactaacaaacaataaacacccacactgctttagaacaataaaaacatgaggagaacaggagcatggtttactttaagaaagatcctacgctgggcgtggtggctcaaacctgtaatcccagaacttcgggaggtcagaggcaggaggactgcttgagtccaggagttcaaggctgcagtgagctgtgatcacaccactgtactccagcctgggcaacatagcaagaccttgtctcaaaaaaagaaagatcctaggcctggaagccagaggactaggctcagtcctagctgtcagtaaccagatgggcctcctcagacattccacttaaccgctttgagcctcaatttccttatctgttaaagtggaaataatactttctgatttatagtactatgaggattctcctgaggacaggactaccttttttttttttttttttttgggaagtggtttctggtgaaaaccagaaaacctactagataaattctaaaaagaggctgggtgtggtggctcacgcctgtaatcccaacactttgggaggccaaggcaggcggatcacttgaggacaggagtttgagatcagcctggcaaacatgatgaaaccctgtctctactaaaaacgcaaaaattagccaggtgtgggccgggcacggtggctcacgcctgtaaccccagcactttgggaggccgaggtgggtggatcacgaggtcagaagatcgagaccatcctggataacaggctgaaaccccatctctactaaaaatgcaaaaaaatagctgggcatggtggcaggcgcctgtagtcccagctactcgggaggctgaggcaggagaatggcgtgaacccgggaggtggagtttccagtgagccgagatcgtgccactgcactccagcctgggcgacagagcgagactccgcctcaaaaaaaaaaaaaaaaaaaaaaatagccaggtgtggtggtgagtgcctgtaatcccagctacttaggaggctgaggcaggagaatcacttaaacccgggaggcagaggttgtactgagccaaaatcatgccactgcattccagcctgggtggcagaatgagactccatctcagaaaaacaaaacaaaacaaaacaaaacaaaaaacatgtatataaaagagctgagtgtggcactaagactagtgttttattcatccttgtgtcaacacttggcactgtgcctggcacatagaaatactcaataaatgtttgttaaatgaatacaccacaaaatgtacagagtcttttggaaatatagagtaaaaattgagcataattataagtatgtgaaaatcacataagtgattggaaaagaactggaaaggattacagaaaaactggtttgaattgttgggtgataggattatggctacatattttaatcttttattttgatttcagccaaaacactaaatgttaacattctttgaaaagttaaatttgaaaaaatataacggttttaatgagatataattcatataccataaaatacacccatttaaagtatacagttcaattgtttctagtatattcacacaattgtgcaaccatcaccactacctaattttagaagattttctggccgggcacggtggctcacgcctataatcccagcacttcgggaggccaagacgagtggatcacctgaggtcaggagttcgagaccagcctggccaagatggtgaaaccctcatctctactaaaaatacaaaaattagccgggcatggtggtgcacacccataatcccagctacttgggaggcagaggcatgagaatcacttgaacctgggaggtggagtttgtggtgagtcaagatcgtgccactgcactccagcctgggcagcagagtgagactccgtctcaaaaaacaaacaaacaaacaaacaaacaaacaaaaaaaccgattttcatcaccccaaaaagaaatactgtatattagtgattgccagtggctgggagaaaggggaatacgaagtgaatgcagtcactaatctattttctgtttctgcggctttgcatattttgtacatctcacatgaatagatatcaatacagcatacgaccctttgaatctgacttatttcacttagcatattttccatcaagttgtagcatgtatcaggacttcatccctttttattgccagaaaatattccgctgcctagatataccacattttattcatccattcatcagttaatagacatttgggttgtttctactcttttgctattatcaataatgctgctatgaacatccatgtacaagtttttgagtggactcatatttctagttctcttgggtatatatctaggagtggaattgtacacataaccctatgtttaacttaccaaggaactggcaaactgtgtgccaaagtggctgcactattttacattcccaccaacaatatatgagttccaatctctccacatttttgccagcactagttattgccttttttattacagccatcctagggggtgtgaagtagtatctcactgtggtttcgatgtgcattttcctgatgtctaatgataatgagcatctttattggccatgtgtgtatcttctttggagaagggtctattcaaatcctttacccattttataactggattatttgtctttttattgttgagttataagtgttctttatacattctggatactagacccttatcagatatttgatttgcaaatattttctcccattctgtgggttgtcttttcattttcttgatagtatcctttgaagctcaaaagtttttaatcttgaaatagtctaattttaaatgttcttttaaaagcaagatgttatttgtatattatatttaaaaagtacatacatacttcgttcaattgagcacctactaggtgttgggttagggtatacagggagaaataaggcataccctcaagaaaggcataccctcatggagtcagtttgtgcagctgttgttagaaggctgggttggccaggcttctgccctagctctggagggtcctggggtgggattcggcaggcactgggggtgggagagtgggggtgcagaggggagggaagagcctctgcatgaaagccagctgggaaacaggtggagctggactctcctgtggccaggacggggaaaggcacgtctctgagagctacagtttctttcaagcagagagttctctgagctgggaagcagcagtggggaggaaaggaaatcctggcttctccccgaaagccatctcaggatgctgctaaggcaccagccccaaagctacctgacttcctacctctccaagagaacagagagctctatctggagtacccaagatagcccaggagggtgcaaagggctgtccaagaaaaggtcctagggggctccagtgaactgctcacaaataattacatttagaatatcccagaaaatggtaagtgttcagatacatgtaagttaccaatttacccccattactgaaacaacaaaccagtgcctgggaatatctgtttcccacccattcagtgctttggccagactgtgaccaaatcatggcctaagggcagagggctgaagggctgaatggaaatccttggtcttcaggttactgatcttaaattcccactgcttttcataaatctccatcttatcaccaataaggtgatctagaaaagacagggtctcctcagagcctgcttgtgctataactttttctcaacctggtctctcttgcaggacagtgcccattcatttcgaagtgagccaagccgatgatacaactgtcccctgcagcccttccccgcccttgatcctccctcacccacctaccgggatggcagcctgggggtccagtccattctccaccactgaaagcatctccactcacgcagctgctccctcagagaatcacatgacacctgaagagacagatggcagccagatgaatgggcagggaacttccccccagccagagtccattcccagcaagcagcaggaggtcagcctctcttactcaaactgcaaccaaaaaggcctttgaagaacacaaaagtaaaaactgataatagatttgaaggaaagaaacaaggaaggaaagcccagggggctcagtcattgggaggcaaggagtcctgggtgccaggggtgggtccaccccaaggagtaggtggtaagggcgcttcacatcaaatgctgcccagaaagccaaggccctgtaggatcgaaacctgtaggcagggaatgacaggctgattcagatacggagctgcaggttcgagggggaggctgcagctgaaggtggcaggaacccactgggaccaggaagcaggggctcacaggctcacacatcacattcaggggctgggtcctgcaacaccctgcccccacccctcactcctgtcccagtccaacatctgccagctcggcagtaaaaagtaccactggaacggcttcaaaaggggagggctcccttgctacacttctgctcctcatttgggcttcgagggtctggcttgagcagcacagacagggacgtgtctaaccgggatgaccatgaggtctcatcgcagtttgccactaaccagggagacatgcacagacctctcagaaggagaatgtgtaaaatgcctgtcacggggcctgatatgtgcctgtacctgatatgttgtacctggcatctgtcatcccagtggatgtggccacctaaacctacagaccaagaatgtcatcgcctaaatgagtatgcaggaagagttgaagtcagtgagtggttaaatccctcagggctgccagcttcctcctgggagtgggtggggtggggtggggtggggtgggtggggtggggactttagcctgagcctgagggggctgctgactggcttggccccaccacagcaacttggacagacctgggccaggcaggcacattcactcgtaaacaaatctctagccaactcctggctgagcatcaggggaacgccgggaaaggtgatgtctgtctgtctcagctctcaaacaatcaccgcacaaagaagttaacaaaaccaagaaaagttaaatgggctcagttctctttacatatattgcctaatttatgttcctcctaaggaccctaggagtgctgttttattgtctccacctgacagataaggaaatggcagctgacccaggtcaaggaagttcctgaggtcccagggctgataagcggcctgactccaccaccagcccccaggaggaagccaaccccagccctaggaaaacccgattcctaagtgagtgctgtaaaccaaaaataaaattctaagctccccaactgcctgaatgggccccccttggccaaagggatttcaaaaaaactgaaaactgagttcaggccatgacaggaagtggggcgtgggccatgcctcatcctagcctctcccttttggagcttagacacaactgaccagcattaacattgaaacagactcctaagactgacagaacagactctcagcaattaagacaccaactccaacctgactggtctaacatcacatgggagataacaagccctaaggaaatcaaagtatcttacccccaagtatatttttgacatagtttggaatggccctgcaaagccatctcttgttgggaaaatctatgtcctgcagagattcccttccctttctaggccttttcctgatttagaggagatttaactaagagtctgacaccttagagacatttaccatctattctcttgaaggcttcatctacgtaacatgaaccttggctttcacaacccaccttatcttaaacccaagcttttcttctgctgacttttaactctttaggcaaagtttaactttttcagccaattgccaatcaggaaatcttttaatccaccttaccctgtccccaccaatgtataccttacatatattaatttatgtctttgcctgtaacttctgcctgtaacttggataaaaatcaagctgtaccccaatcaccttggggacatgttctcaggacctcccaggactatgtcacaggtcatggccctcacatttggctcagaagaaacctcttcgaatatttaacagagtttggctttttcatcaacagtgccatcacctcagagctaggattccaggggtggtctgggaagatcctttcgctgggggccgggaacagggggtgcaggggaacattaaggccagtgtggcaggaaaggtttcctggacagccctggagcagcatgaggtttggaaagcagacaggcaggctggccctaaatggtggaaggtgctctgattggatctctggcttctggggatagcagagggcaaacaggacacagggagtcaggacccagagccaacctccctaagtcaggtccctcaggaggaagcaggcatgtatggaggatggttcctgcagacccagtaacaggccgggtgctgcagatggccagaagagccctcagtcctgactacagccccatctgactgcctcacccttcaccatagtctgctcccagctacccagggattctcagagccctcctccggagaccagttccacattctggccacggggtgacaggaaaagggggctgtatgctgcagtgactctgcatctagggtcacttccagaaacaggcctggtcttgaggtcaggctccatcaaggctacccttttgcagctcagcaggccacgtccagcttctctggctccgaaaccctgggctccaatcccaatccacaatttccagtggcctgaggccctcaggcccacccttctagagagagcccgaagccccaaagttgcccttcccttaaccagctacagggccgggaccctaaggacttagacccaataatttgaattatagcccaggcccattaagacctcattaactaattagctgagagtgatagagtattcacagagtattcactgggaggagcaggccattggtaagtcagtgctctggccaagtaacagtatgctaagaaaacaaaataggccaggtgccatggcccacacctgtaatcccagcactttgggaggccgaggcaggaggttcacttgaggtcaggagtttgagaccagcctggccaacatggtgaaaccctgtctctaattaaaaaaaaaacaaaaattagccaggcatggtggcccatgcctgtaataccagctactggtattaccagctaccataccggctgaggcaggagaaccacttgaacccaggaggcggaggttgcagtgagttgagatcgtgccactgcactccagccggggcagcaaagcaagaataaataaataaataaataatttatgtctcaaataaataaataaataataaactgaagctggctgggcgcggtggctcatgcctgtaatcccagcactttgggaggccgaggcgggtggatcacgaggtcaggagatcgagaccatcgtggctaacacggtgaaaccccatctctactaaaaatacaaaaaattagccgggcgtggtggcgggtgcctgtagttgcagctactcgggaggctgagggagaatggcgtggacccaggaggtggagcttgcagtgagccaagatcgtgccactgcacaccagcttgggcaacagagcgagactccatctcaaaacaaaaaaaaattaataataataaactgaagctaagagagacagggccagacaagagaagggtcacttggcctaaaacagagtcagaaatgccacaaaatgactgacaagagctcagagaaatccagcagaagagccacttgaaaattcacaagataggactgagcctctggggttccagccacaatgcaggacacctctgtttgtaggcagccatagcaccccacctatctgtatctgttccatcatgctcagggaggcagggctcagatggtcagtgacataagaactcacggcaggaatcagaaggaggctttgtgtctcttgactgtggggacagcactgcgtcacccaccctggtggcccagattctgaatctaccatcctatggaactggttccactttctgtcctcaaaacgctcttcattgacacaaagaaccaaagtgaagagaggtgtggcttcaaggagacctacctgaagggagtgaggcaaagctgggcaacagtaccaaagggctcttgaacatgacgggtgaaagcttagcaggggaaaggtgactggtgccatttaggaagccccaaaccacaccaagtctactgccaccctatgtattcattcgccttcacatagctctccagagtgcagaaagcaagcttctctgatgtccctctctaacctcatttaattctcacagcaatcccgtgagagagtgattatccctgttttacagaggacaaaactgaggctcagtagcaatgggtctcaggtaagggacagaactctctggtttcttcatcccaactcctgcatctttccctggaccaaaaggcctcaggtctttggctcaaattcagacaaactattacttcttctttagaggtacgcggaagctccatttcatcacagaaggtctgaaaccaacaagaaacagttctgccaatcaggtttatagccccaaccagctgagaccaggtcctaccaatgctcctaaagtctcagagctatactttcttaaatgttccaacatagttaggaaggaacagttccggctggtttcctgcattatactgcctggccttctctatatgtccaatttcacttcctccagagatcaaggaagcaaaaaaagagaatgacctggatgagacttacgttaaaagaagaaagggataacctggtttcaccactctcaaaacactccaccatgactgaacagcaacctcttctcttgagggactcctcagccactccccatggccttctctccactgcccgaattgtgtaactggctgttcagagccacagcctggctttaagccatccaactgctgtaccaattgatggagtcatgttttttcaattggaaaagaatgacaaagttatcctctgattcagaaaggcagctgatctttcaggcatgtgagtgctgactgaggaaaccgcacctctgtccacctgaggaaagctggatttctgtgatgggtggagtggtgggggttggagctttgaagcaattaaataccagatgaagggtgagaaacttttagtttgtgattcccaaactcagggctagtggatgagggcagaattgtggagtcagtgaacactagctatctttctttcctccctccttccttccatccagtatcacccagcttccctgtattcttgtcccatatcccagaggattctaacaaggaccaaactctgaatgaatgaaaacaggaccgttgcctgacccattcaccattgtatttctagtacctggaacagtgtttggcacagactggtgctcaaaaaataagctgttgaatgaattgattaataaaataaaaacaaggcacggggcacgtacctccacttcacacactgtgggaagttggggtatacaactcttaagtgctggggcaactgtggagctcctgtcattaagccaagctgccaataaggctgaaaacaacttaaatatactgcatattaatgggaggacattgaaggtaaacagcattcacttttcaaaggaatacgactataagtggcaagcacagacaatgttctttggggccctttaaaactgcaatcagccgggcacggcagctcacgcctgtaatcccagcactttgggaggccgaggtgggtgggtcacctgaggttgggagttggagaccagcctgatcaacacagagaaacccccatctctactaaaaacacaaaactagccgggcatggtggtgtatgcctgtaatcccagctactcgggaggctgaggcaggagaatcgcttgaacctgggaggcagaggttgcggtgagccgagatcatgccactgcactccagcctggggaacaagagtaaactccgtcgaaaaaaaaaaaaagaaagaaagaaaaaagctgcaatcaaatggcccacccatctgatgccgggtcctcaggattcagagaaaatgtgtaccaaaaagcccccaggaaaccataaatgctgagcataggacttgggtgcctctggaatgtccttctgcctcagctactctgagataacatggtcccctgtgttcatggaacccagatggccaaaagtcaatgatccagcacttataagaaaagaaagcgattcaagagcctctgtacccacctaggcctcagcctccccaggacctactcacctatactcttcacaacaggtaacgttgcctctggcacccatcatatcccctgaattcagcatcaggactgatctgccatcagctctggcagggagagtcccttacaagtgccaagaaaaggaacatgaacaatattctgtgaccacagccaacaccacacagaacttcccagaagctctccagggcgagaacaccaaccagaaggaagtgacagcttccatcattctgtgctaagtgagctgagtgagtggccatctctcaccttccagatatttgaatgatacctaccattccagcagccagcacaagtcatttaatatgaatgccagaaacacaatccctgaggacaggtacaggagaccagatgccaggaaaaaccccggccccacccaagagttggggagagcccactgctcctccacccttatttaccacctgagcccctgcacccgccaatcatgctgctcagtctgtaactgcgggtctgagtgagcacctacatttggctgttgaggggcagctggtggagttggcaggcgactctgcactaagttctcaggttgaatgggagttgggtcgagggaaggaatggacgcagagttagggtgaagagttgcggtgggtcagcgggggtgaaaggacatggagatgtcatttttaacaagattgggtgagggtggtaggaaaggaggcagcaagagttcgggacagtttggcaaagacttagggatggggtgtcctcagtacggcaggagacgcaaaggaaggtatacagtgggctaggagactaaggacgagaagacacagttacgacttggaataaggctgagatcggagttatccagaagaaagcggtgagctcaacagggcacctactttgggggtgggtcttagatgagagggcggaggtagaatgtttaggatgagcagatcttggggagctggacaggggatgggggtgactgggataagaaagctgagccagaaaaggggaaacctgaatggtgggtctcggggaggtgagcgcggagcatcgggattaccagaggggtggggagagaggatgaggtgtgtcagggcggggcgaagggacgtggccgagatcggggttggaactggggtaaaatggggtcacgagtgaagctgcatttaagcaagaccgctggtgaggggatgcgggcgcgggctgggggctggacagacggaggggacggggccacagcggcggtgcagggggaaggctgggtcggagcggagcgggcgcgggctggacagggctgagggctctgaagccgggcagtctcagggtaaccaggggctgggaatcgcggagggagcgggaggcccaccgcccgttcgcgcctcggccctcccaccactccgccgccctcctcgcatcttgaccccctaactcaccaagcggagcgaggagcgaggcgaggggggctcccggctgcggcagcccctcagcctccgagccgacgatgcggtctctcggccactgacaacaggaagcagcgccccggcccctgacgccatcacgttggctcggcgctccggccctgcccccggcccgcggtgccaatcgcgcagcccgaaggagccttggggcggggccagctgctcccggaagtccctgggagctgagccccggggcagatgcgaggtctgggaggctggggaactgggggcgcctgcagggcgcagagaggcgacggcaccggtgtcagggagaacgcatccgttaccgcccgcctcccgcaggtctgcgtcaaactagatcctggcttctgggttcctgacctcgtttggcctcagaaccatctgtgcaacattggggctgtcacttcgcctccctcagctgaagagttcccacttgtgagtgggactaataacgcctgccctatctttgcctctccgagggcagcagtgcagcccgtggggcggagcccgggcccaaattggagcctccgcgttgcgctttcaggataaacacagctgttttgaccacactttatcccaagggaacgccttgaggtccccttgggcacactcccgtgtgtaactcgcccattagcaccgcctggcttgaagcttaggggtctggttattctcttctagcccgtgtagaggatttctttcttcctttctgtttttttttttttttttttgggacagggtctcactctgtcgcccagactggagtgctgtggcacgatcacggctcaccacagctttgacctcacggactaagcggttctcccacctcagcctccacgcagctgggactacaggcgtgcaccaccacgcccagctaattttttcttcttcttttttttttttttttttttgcgacggagtctggctctgtcgcccaggctggagtgcaatggcgcgatctcggctcactgcaagctccgcctcctgggtcgacgccattctcctgcctcagcctcccgagtagctgggactacaggagcccgccaccacgcccggctaatttttttatgtttttagtaggatggggtttcaccgtgttagccaggatggtctcgatctcctgacctggtgatccacccgcctcggcctcccaaagtgctgggattacaggcgtgagccaccgcgcccggccaatcttttcatttttaaaaaaatttatttattttgtagagacagggtctcactgtgttacctagcctggtctccaactcctggcctcaggcgatcctcctgactcggcctcccaaagtgctgggattacaggcatgaaccaccacacctggcctgtatatcttctttctaacgcaaaagtgacatttctctttcagatgaactcggaacaaaatgtcataagtggtggccacaggtagtgaagagcagggcagggagtgttggcagggacccatgctctggacactttatacttgcaggctttggtcaattgggagcctagggcctgagtgtggatgaggagaggtactgctacatgccagtcgtaagtgggcacaggggttggctggggaacgggccagttcttggaagcaagcttcactgccctcggcctgggcgtcctgtgctcttttggcttctctgggtaggaaggtgtccctcttatctctgcaaaggtcagagtcccactgtctgctttcaagtataaaaccagcacttgggggtatgaccctggactgtatgagggccgccctttcagtaattctctctccaggagtgagaacctccccttctcaattttagactagatgggtctgagtgtgtttagtgcagttaatggttgagcaggaagattagaaataaggacatagagacaaactattctctcggtgttaaactcattttaaacaaagtggaaagtaagggatttagtagggaaatcctttcaccttggcaaaacgatagtatacaactggcacagcatgatccttggtggcttggcacaagcattccctgtccccccccatcaagcacataatgtccctcagtaattccactgcatttttgtgcagcggctgtgtgctggagtgtggggaaccccccggtaatctcttgtctgctttttaggagcccctatctcctggtcttctcttacctcccaagctaccctgcttctttgaaaagtctgcaggcttgtctacctcttctcagcttgctctgcatgccttggggaagctgcataaagcatggatcatgaaggaggggggcggaggagagggaaatgcatgtttgcacaaatggaccctgagcccaccaggcaggctccagatagggaaaaaaaaaaaaaaaaaaacccttacattatcatgtgacttgcgcaagaaaaaaggtacctgcaaagggccaagggaccagagaggagaacttgagaggtattctggaggaggctacttttgatatgagctttctaggtgagtaaagggtattgcagctgaagggactggctggtaagtggccagcagataggaatacaggctgagctcagggaagggtgcacccagaggtggggaggaaggtgggaagtgaaaaaggaggctgggcgcggtgggtcatgcctgtaatcccagcactttgggtggctgaagctggtggatcacttgaggtcaggagttcgagacctgcctggccaacatggtgaaagtccatctctactaaaaatacaaaaatttgccatgtgtggtggtgtgcgtctgtagtcccagctactaaggaggctgaggtatgagaattgcttgaacccgggaggcggagattgcagtgagccaagataatgccactgcactacagcctgggcgacagagtgagatcctgtctcaaaaaaaatttttttaataataataaaaataaataaaaataaaaggaagtgaaaaaggaaaggggaaggggagagggccagaatggaaggggagctgaagactgagcaaggcaaagttggaggccagtgcagaaagggctcaaaccatttgcaaggatggttcacatcccactggtctgtcagcttagatttaaagcactacccagcgttattcaaagccagacaggagaactgtaggcatcagaatgccctggggacaggtccaaaatgcagattcctaagccccacactaaccctaaagagtcactctaggatgaggtccaagaatttgggcttgaccccaccgctcctgtcccctgccctcacactgaggacctaaaggataatgaaaggggggaatctgtgccctaaataatcccttttggcagttactttctgttttcaaagttcaagtctgtcctccgggactaacctaggagatgagggataagggaattaacatttatggaaaatggaagaacctacataggcacctgtgttcacctaatatgccttaccagccacctgaaaggtgggtgctgccattatctccattgtatggatgagaaaataggcttaaaagaggttaagtggccaggtgcagtggctcacgcctgtaatcccagcactttgggaggccgaggtgggtggatcaagagatccagaccatcctggccaacatggtgaaaccctgtctctactaaaaatacaaagaattagctgggtgtggtagcgcgcatctgtagtcccagctacttgggaggctgaagcaggagaatcgcttgaacccaggaggcagaggttgcagtgaaccgagatcacgccactgcactccagcctggtgacagagcgagacttcatctcttaaaaaaaaaaaaaaaaaaaaaaaaaagaggttaagtaacttgcgggggagccacagccacagaagtattaagtgctagaagtaggattcttacctagttctttctgattctagtttcagctttgttcagtgggttttagagccagggctgtttaggtttgaatctcatctctatcccatattgtttgctgggacttccttaaaacagtgtggggcccagggcaacccaatgagtatggggctaagacagctgacagctgccaccaaatcagcatttttcacaggcccgttgagatagcagtgaagacagaaatttctaaattgaattttattgatgttcaggaaagagaagtaagtcacaccgcctcttggtcctcagccccaagcagagagcccagagtgtgtgacctcaggcaagtgccaaaacctctctgagcctcagttcctcattgtaaataggggctaatgtcagttgatgtgaggagtaaatatcatgatatcctggctgggcacagtggctcacgcctgtaatcccataactttgggaggctgaggtgggtggattacttgaggccaggagttcgaaaccagcctggccaacatggtgaaaccccatctctaccaaagatacaaaaattagccaggcatgatggttcatgcctgtagtcccaggtacttgtgaggctgaggcacaagaatcgcttgaagctgggaggctgaggttgcagtgagctgagattgcgccactgcactgcagcctacatgacagagtgagactctgttccaaaacaacaacaacaacaaaaaaaaaaaaaaaaaaagaaaagaaaaaaagaaaagaaaaagatgatatccttaatgcaagttctggcctgtagtaagtgctcaaagatgaacagttgttattattctagttgtggctaattttcaccctgccaattgggcaggtccttgccttccattgctcttgtaagcacctgaatgagagcctttcttgtctgaaccccagatatattcttgcttggcgtctgattgaaataataaaactaatgttaatgcaccctcctctctggacactggaatcactggtgtgctcttcagttctgttgtaggaagcggtttctttccactctctcttttttaaaaaattgattaaaaagtgttgttatacacacggtttacaattcaataaaatgaaacggaatggggatgaaacataacgaacaacagcagttcattgtccccattgttcccacccttctggggagcaggctttcagcagaatcttctggtgcttctccccacatctcctgcacgtctcattgtttgtattttattatttttttgagacacagtctcgctctgtcacccaggctggagtggtgccatcttggctcactgcaacctccgcctcctgggttcaagcaatgctcctgcctcagcctccctactagctgggattacaggcacctgccaccatgcccagcgaatttgatatttttagtagacgcggggtttcaccatgttgtcaagcctgatctcaaactcctgacctcacgtgatccacccgccttggcctcccaaagtgctgggattacaggcgtgagccaccgcgcccagctgtctcatagttttagacactgtctgttgccttcctggtaaacctggcaaggacttagctcttttacaccccagccctgtccattcttgaggtttgggtatgccacaatttgtagaaaatgaaccatgtttacagaattgtgactatataaatattattcaccacagagcttaataatgtgctgtgaggtcaggcatggtggctcatgcctgtaatcccagcactttgggaggccaaggtgggcggatcacctgaggtcgggagttcaagaccaacatggccaacatggagaaaccccatctctactaaaaatacaaaaattagccgggtgtggtggtgcccccctgtagtctcagctacttgggaggctgaggcagagaatcacttgaacctgggaggtggaggttgcagtgggctgagatcatgccactgcactccagcctgggcaacagagtgagactctatctcaaaatataataaaataaaaataaaatacactctgatgatgatggctgcttcccccaagggtgcctcaagctctccttttctttcagtgccatctgccattatcgtgcccttgttctcttccagtgctctggcggagcaggtggcgcccaggcccacagtgccctctccaagttctgtcctccatgtgctcaagttatcccctaaacttgtcacatgtggtcatcctggaactttgcttaactgcttcctgggttggggcctttatttcctggctcccttctcttcttgcttaatttcccctccctttgctgcagcacatactcagttaagaatccctttctaacattaaaaaaagaaaaagagaatagttcttggacctcctcatgatagaaattatatctttaggccgggtgtggtggctcacgtgtgtaatcccagcagtttgggaggccgaggcaggtggatcacttgagctcaggagttcaaaaccagcctgagcaacatggtaaaaccctatctctacaaaaagtacaaaaattagccaggtgtggttgcatgtacctgcaatcccagctactcaggaagctgagggaggagaatctcttgaacccaggaggtggaggttgcaatgagctctgatcatgccactgcactccagcctgggcgacagagtgagaccctgtctcaaaaaaaaagaaaataaagttgtatctttaatatccattaactgaaaaataaaaataaaaataaggaccaaaaattactatgcggacacacatgcttttaaatgaatttgtgtgttattaaccacagtaacatctatgaacctgtgaaaaactgttactggtttaggcttaagggtttgcccagtctagcttcaatgttcaatgggtgggcacggtggctcacactttgggaggtggccaaggcaggcagatcgcttagtccaggagttggagaccagcctgagccacatagcgaaaccctatctctacaaaaaatttaaaaattagccgtgtgcagtcacgcgcacctgtagtcccagatattggagggcagtggggggtggcgctgaggcgggaggatcacttgaggccagaaggtcaaggctgcagtgagccgaggctgagtcactgcactccagcctgggtggcacagcaaaactctgtcaaaaaaacaaaacaaaacaaaacaaacaaacaaaaaccaaagttggatgcagtggctcatatctgtaatcccaacaacttggaaggctcaggcaggaggattgcttgaggccaggagttcaagaccagcctgggcaacatagtgagaccctcgcctctgaaaaaattaaatattaataaaaacaaaccctagtagcttcagtctttgattctccatccctcatttcatccctttgtcttctggtaatataatttccttcttgtttttcctttgggatgagccactttcgctccctgggattctgctgggattgagttaccgccttccgggctcaagcgatcctcccacctcagcctcccaagtcgctaagaccataggtgcatgccaccatgcctggctaatgttttgtattttctgtagagccggcgttttaccctgttgcccaggagtttttcctttaatgttctcctgctacttactaattcactttgtcaccctgtgagctcataagagcagagagatagcaacaggagctaaaaaaaactctaagctgggaaaaaatattaaatatgaaatcatgatagctattagcttaatttgttttaggcaaattgcaaagtaattttttgggaatcagtgtcccactgcagtgattccatacggggattcctaattcccagtatgtttttaaaataatttgtaaacacctagtacaaacacatgatatgaaattcaagaggtacaaaagggcatacagccctgcactctcccagtttccctccccgaaggcaaccgccattaccagtttctcgtgtgtgcttccagaggtattcttgtccaacagaacttcagtgatgaaaacagttgcctgtgctgccagtttggaagccattagccacacggggcagttgagcacttgatatgtggctagtgtgtcttaggagctgaatttaaaaaaaaatttttttttttttaaagactcagtgtcttgctctgtttaccagactggactgcagtgatgtgtgaacatggcctcaaactcctatttatttattttttgagacagggcctcactctgttgtccaggctggagtgcagtggtgcagtcataggtcactgcaaccttgacctcctgggctcaagaaatcctcccacctcagcctcctaagttgctgggactacagatgaatgccaccatgtttggctgatttttacaattttaaattttttgcctgggcgcagtggctcatgcctgtaatctcagcactttgggaggctgaggcgggcagatcacctgaggtcaggagttcgagaccagcctggccaacatggcgaaaccttgtctctaccaaaaatacaaaaatttgctgggcatggtggtgcgtgcctgtagtcccagctacttggaggctgaggcacgataatcgctgaacccaggaggcagatgttgtaataagctgagactgcgccactgcactccagcctgggtgacagagtgagacccgtctcaaaaaaaataaaaataaataaataaataaattttttgtagaaaaggggtttcactatgttgcccagggtgttcttgaactattggcctcaagctatcctcccacttggcctcccaaagtgctaggattacaggcatgagctactgtggccaacctaaatttatatgtaaatagccatatgtggctagtggctactgtatcagacctcacagttctgtacagataacgcacagcgcacagtagcatactatacacgccctactaaatcttgctttgttcccttaacggcacctatgcatcttggagatagattgtcccagtctgcctcatttttaaaaactgctgcataatatcctcttgtaatccacaaaggcaatcccagacccagcctggggggccatgggtcatcactttttacaacaagctctaaaatcttccacatataccataatcaaggcacttcagaacaaccctaggttcctcatgcctctacttttattagcctgggcctgacatagttggacattgaatagtcacttctgggggctggtggaaataatttaccatgagtgactgccctaaaatatactctccacccacatggcccgtgtctggcattcactagtgctggtggcattctttaaggttgctcatatctctaagtggttctcctttaaagagcaaagtctcctgggaaaggtggtcattaagcagaacatctggggctcatcttgcttttgccctgttgagaggggccaagggacttggtagagcagcaggggctctgacggtgaacctcattgtttttaaaattattcttaagaggccaggtgcgttggctcacacctgtagtcccaggattttgaggagcagaggcaggaggatcgtttgagtccaggagttcaagattagactgagcaacacggggagacctcatctctacaaaaaatttaaaagaaaattaattgggcatcgtggcatgagcctgtggttcccgctactcgggaggctgaggtgggaggctgtggttcccgctactcacctgagcccaggaggttgagacttgcagtgagctgagttcacaccactgtactcgagccttgatgacagaatgagagtttctcaaaaaaaaaaaaaaaaaaaaaattgtccttaagtccatgtggacccctgactaggtttgtgccctagacagccttcctctgagggcaattcaggtggtgagactccagctttaaatggcctctagagaaatttcactaacctgccttggtgtttgaccctgtataacccctttcttctggaggtccctttgggtggcagtagatacgggatttggtgtctgacagctctggggacagatcccagctccaaatggcagagtctctacagattacaagccaaatacttagcactatgtgctgatcttcaggaagtcagtctatatttcataacaagtcacatggggataatgaaggaatggcctaaaacgctctcagtaatattcctgagtcatccctcagggctgggcttggtgttaggcatggcggggaagggagcagagctgtgtgcagaggaagatgcagttcttgccttgtcagggtccctgacctgatggcgacccatggtggagtcttcatagtgatagacaccactgtaaaagcagatccaggttgtgcaaccctcaaagcaggtctcctcactcaccgggatagatagactattggcggtacctgcatccaccgcttgccatggtttcgttgtgggtggaggatactttcctgtcccctggctttgggtttgcccatgtggattgctctggccttggaatgaagcagaaaccaaaggctgccagttccgagcccacgtctgaagtcgccttaggtggttccgcgggccccgtgcgctcccaccttcacccagagggccttctctggtgcagccgctgcttcttcagcctccgcccaaaaggaacggaggcccctggctgatccgcaggcctacagggagccacagagcgcagcggctggaccagcgttcaagcccaagcacaggcctgcgagaaccttgttccagccgccgtttaggatggttgattaggacgcgttgcagtggcggtagctcaccaatccagtgcgtgcacccgctcctttattaggccatagagccagtggctcccacagggacctgatacaacagtgcgttaaataaggagcatattgagctctcatgtcgtaagccagtggagaagtccagggctagtgtgggggctccggcgggggctgtggcccgcatccgcatggagcctccccatggttcacaggtctcagtcttcggagccttcggccctgcgagcccgaacggtccacaggggggcgccaaaccctctttcgaacgccatcctctaaagcctaggctccaaccggttccatttcttcaggctcaggattttcactcttctcgaatgggggtgtccctcccccaatcttctgagtcgcaacagcatctccctccctccaggacctcagagccagagctgggcgagaggccctgacctccggggtagggtggaagcgtccctgtgaaggtgctgtcctgcctcccatccccaggcgccgggcctctcccaccctcagcgccctgctcacctccagctgaagatgtcagggcacctctgcttcctccctgccgtttctgcagtaccgccgagtgtgcataaacgggtttaatacaggctttgctgggtgcggggactcccacctgtaatcccagtaccttgagagaccaaggcgggaggatcacttgaggccaggagttcaaaaccagcctgggcaacaaagtgaggcccgtctctggaaaaaaaaaaaaaaaaaagaataaaagaggtccctttttctgggagattgatataggggagtgtgagttagaagggaggcatcgaggatcagtcatttaaagcagcatccaaggatgttcaaggctagagatccacaggtgtattttcagaaactgaatttcctggcggggcacagtgactcatgcctgtaatcccagcactttgggaggccaaggtgagtggatcacttgaggtcaggagttcaagactagcctggccaacatgctgaaactgtttttagaaaaaaaaaaattggccaggcatggtggtgggcgcctgtaatcccagctattcgggaggctgaggcaggagaatcacttgaacctggaaggcagaggttgcagtcaaccgagatcacgctactgcactccagcctgggtgacagagactgtctccaaaaacaaacaaacacacaaacaaaacacaaaaaaaccccaaaacccaaaacaagccaggcgtggtagctcgcacctgtaatctcagccctttgggaggccagggcgggtggattacctgaggtcaggagtttgagaccagcctgaccaacatggggaaaccccgtctctactaaaaatacaaaaattagccgggcatggtggtgcatgcctgtaaccccagctactagggaggctgaggcaggagacttgcttgaacccaggaggcagaggatgcagtgagctgagatcgtgccattgcattccagactgagcaacaagagcaaaactccaccttaaaagaaaaaaaaaaaaagaaaaaacaaacaaaactcctgaatttccctgtggataccttttctctggcagactttttcaatgagggctaagttgtctccaatactatatggcctgtagaccgctcagctttcattccagtgaaaacattccagaaaaatctctgaatcaatcccaggtgtttctccaatcagctcaggatgattgtgtgttacctgctgcccagctagtgacacctctccaggcctctgacttagctaggtctccaccatgtgactccaccgtagactccccgccttcttcttttgcaaagccttggacacccaaacacctaccaaaagtgggttagtgtgccaggacacctccaagtgtaagtggggctctccagcacacctggatgtggaggtgtgatgcagagtggtggctgctcgtgacactcatttcacccctttctgtgcaggtgccagaagcccaggaagcacacatcaaggctcgcttgccagcggggtgctgccaataaaatgtagtcacgtggaatttgggatgtggaaaggaggtagaagtcatcctttcctcccccatagcagcaggtgtgcaggctctggtggtcagctggactccatactcccccaccagtcaccagcctggggaccgtggggctgcaaggacctcagcagcagtttcccaagtttcctgacttcttccatcctctggaaatcagctgtggtaaagtagcctgaaagccagtggtgcaaccccatccccacaaccttcaccacctctagcccctccagtgataagcactaattgcctatatacaacccttttttgtttgaaatatctagagtaatttctgttttcctatctggggtagtgtaacataagaagaaatatatatttggtctctgcccccagttcctaacacaaagctcccaaaacccttgaaaattcctgaatgatggcagtgctaagagcattgtcctttgttagtttatcatttttcttttctcctaggtgttttttcctttttaaacttttcttttaggttagggggtacatatgcacgttcgttatatagctaaacttgtgtcatgggggtttgttgtacagattatttcatcacccaggtaccaagcctagtacccaatagttttttctgctcctctccctcctcccaccctccaccctcaggtagggcccagtgtctattgtttatgagttctcattattttgctcccacttataagaacatacagtatttggttttctgttcctgtcttagtttgctgaggataatggcctctagctccatctgtgttcctgcaaaagacatgatctcgctgttttttatggttgcacatcttttgttctaacatttggtccttaaacctggttcctgacacagagctcctaaatcccttggaattttctgggtgatagaagcgtcctttgttctcatgaggtgactcttggtgggctccttatttggggactggtcaccaaaaagacctatggttggaagtgttgtgctgtcagccccattccccatcctctggggtggggagtggagctggagctcaatcatgcctacgtgataaagcctccagaaaactccttaaaagacaggacttggagagcttccgggttggcgaacacatccatgttccaggagagtggtgcaccccaactccacaaggacccttccagacgtcaccctgtgtatctcttcatctggcttcatcatttgtgtcctttaaaatatcctttgtaataaatcagcaatagtaagaaaactgttttcctgggttccatgagctgttttagcaaatgttcaaacctgaggagggagttgtggggacctccaatttatagccagttggtcagatgcataggtgatgcttggccttgcacctggggtctgacatggggatggtcctgtgtgacagagcccttaacctgtggagtctggtgctcactctgcttagggcttctctgcctttttagtgtccttctagaaggcctttccttcctcttgtcagctcagaaaacttttcttccacttcccttcttctaaaccatcccttacatctactcctttccagccgaccaagagcagaaccacggctggctccactgccaccatgctgtcccacactgtctcctcgggatgtattcagatgtccaaccctccccccagtctaggagccacccccctttgaggaaagggatgctggcctagtcaactctttcccagcaccaggcacagcatctggcacattccatctttttcatggactctccccaggcggcctgaccttccctcctctgaaccagtgcatttcttgtctgcatcatgtttgccctaatcagataccaccttatttccatcttttaaaaaatgctctatttctctggcaggcttcatcggaatcacaattttcattcatttagtaactgttggccttgtatccacctctctctggcactcaggtctcacttaagagctggctgtctgtgatttgcaatcagtgagatggagacagagggagccctaggcagtcatgttttgttccacctgaccctgggcgccactccccctcccaggctacaggcggacatgggcaccagccagggagagacagctcatccatactctggcccagcagaaactctgggcttagacaaaactgctcaattgaggacaaactgggcaaagtagaatcttactttgggagtttttagaaatatggtggggtggcatttgggaataataagaattgtagctgggcatggtggtacgcgcctgtagacccccagctctggaggctgaggtaggaggatctttggagcccaagagcttgaagcagcagtgagctatgaagcaccactgcactccaccctgggtgacagatcaagaccctgtctgaaaaaaaaaatgtacacatttgagatgcataaaattttcttgttatataaaaaaattataagcatcgaaatgtgaaattatgtaaatatgccaaaatagaaacctggaggtgcttggaatccagactttgagagcccagcagtgcaaggatctctagtgttggcttttttttttttgagatgggatctcactctgttgcccaggctagtgtgcagtggcccattataagctcactgcaagctccgcctcccaggttcaagcaattctctctccctcagcttcctgagtaactggtgttacaggcgtgcatcaccaccctcagctaatttttgtaatttttagtagagacagggttttgccatgttggccagggaggtcttgaactcctgcctcaggtggtccacctacctcagcctcccaaagtgctgggattacaagcatgagtcactgcacccggccttgtcttggcttcttgtcagctccctgcttatgtccaacactcacccctattagagctggtgtggggagcttctgtcctgatgacttaacagtgtaattaaagtgcttagcgctgtacctggaccacagctggtgccaataaacagcagctgccatcatcctcaccatctgcatgttattgttatattaactctttgatggcaaccatggcttatccccccaactacctaagccctacagcagggcagtagaatggttaagaggctttgaagtctaacagtgctagcttaaaaccctaatttgttgctttggatgtgtggctttggacactttgggcagctcacctacgttctttgagccctgtatccttatctgtcagatgatgatttttttttttttttttgagatggagtctcattctcttgcccaggctggagtgcagtggcgtgatcttggctcactgcaagctccaccttccaggttcacaccattctcctgcctcagcttcccgagtagctgggactacaggctcctgccaccacacccggctaatttttttgtatttttagtggagacagggtttcaccatgttagccaggatggtctcgatctcctgacctcgtgatccgcccgcctcagcctcccaaagtgtcagatgattttaacaactatgcttccatgaattgctgggctagatgatgtgactgtaaaatgcctaacccacggtttagcatcaagtaagcaaattgtaaatggtagcgctactctgcctatgactatttagtcttgtgctttaaactcaaatatttgttggcctactgaagtcaccacacagagaaatatgcttttcattctcagtaaagaactttgggagataactggggcaggcagcaagagaacagatgtcatatgtctagatgtcatatgtctagcatcagcaaactcatcggaactgatgggcagctcactttgcttagaacctgcaccagcatacacacggggctgcttcccagtcacactgctcctgggaaggtaggggggctgctgttctgcaattagcacggttctttacctcctattaccgaactgccagagttcatttgtgttcagttaggtagatgaccaattcttgttcattcctattttcttttgctcactaatgtgtttaacgttcactaacctaccaaatgtgatttattagtgactttttctttgaagatggagtggaggaatcctagtgctttctgcaacatgctactgctgttatggaacagtgcagttatggatgtgcatcagccggggatggggagaggctagggcagtacatgtgaatggagaggtagccccaccagtgtgttttctgaaatacagtccctcagagggcagtcttgggaaattactgttcttacacattcttcttgactgtacccctccagcacctccctgctatccaagggttgggatttttaaaaagaaaaacacattttaaaaaaagcaatgtgaatcttttgccatcttgtaagggtgaaaagccccctaccaagtcgggatgaacattcatgcgtgtgcttgagggcttgggaaaaagacagggcttggccccacagtgcaggtaggcccagtgatcctatgataggggccaggagatgggaggtcccctgtgggcaggagttcaagtatgtggtattatatgactggtgcttgatgaaccaagggagagggcaccaaaaacaatgttatttaattgtaaaatctccaccccctgagcatatgttttcaggtctgggtgactaattagactgggaaacaagggcaggaacgatggccctgtgcttgctctgcccgctgcctctgtggatgtgtgggccgctggcttcagtcctgcttttttgatggccgttgtttacgctatgtatttttgcaggaggcctgaggtgggctgggttctcctcctatggcagggcttcactctcctcctccgttggggcttcgctgtccctgggataagaataacaatgccaaggttttgattcttgaaaggagcaattaagcttctcaccccctcctcattttagatgggaactgtgagggccccgtcatttacccagggtccctgttgaggatcttgtcctcattagatgacttcttgtgcagcttccatgtgtgattatttactcttgtggcactgagaggtttgtacatatctttaagccagatagtttggctcattccccaggctggagtgcaatggtgctatcgtggctccctgcaacctgcgcctcctggcttcaagcagttctcctgcctcagcctcccaagtagctgggattacaggcctgcgccaccacacccagctaatttagtatttttagtagagatgggctttcaccatgttggtcaggctggtcacgagctcctaacctcaagtgatcccaaagtgctgtgattacaggcatgagccatcctgcctggcctttctggttaaaattctgtgaggtttgcataaaaggaatagagtaggggcccaaaaaccagtaagatgagaaaatagtgtttcctcagttctaggatccaggggaaaaaaaaaaagaaataaaagagaaaatactgtttcctgccacttaagaggaaggactcacatatcctaccttccatcagccttgaaggagacaagtgccctctctctcacacccggtggccttcccttcccctttcccagagcctccaagaaggcccctggcctggcctgatgcccaccatcagcagcaataggcaccaaaacctttctccttcctatccctccccacctcccgaaagggctggggacagcaggtgtgtccttgttagttccatccagctcagctttggctggggagctaatttcactggagccaggctaagcattagggtaagtaagtatttgtcctgtctcgggcagtttcctcactgaaaaatgagggcagagttctaagccctcctctaattctaaaattctaattaaaacgtcgcgagactagtggtggtgcatgcctgtaatcccagctactcgggaggctgaggcaggagaatcgcttgaacctgggaagtggaggttgccgtgagccgagatcgcgtcattgcactccagcctggcaacaagagggaaactccgtctcaaaagaaaagaaaaaaaaatcaccagactaatatttaccttgagaatccttcttcatcttcttgtaatgaccttcggtgacaacagatctgttttagaagaaaacgcaattaagattatctatgacaacaaccaccatctccaaatctgtattgattccttttattcattataagtctcatctacctgatgaggtaacttttttgaagacaggaattgcatactgtgtaacactgctttgattcttccatagttcagtcatccttgctatcttgcgggggattggttctaggataccgcccccacaccataccagaatctgtggatgctcaatcccttacacataatggtgtagtatttgcttataaccaacacgcatcccccctatactttatttacttagcgacaggattgccctctgttgcttacgctggagtgcagtgtcattctctgttactcaggatggagtgcggtgtcacgatcacagctcactgtagcctcaacctcctgggctccagtgatccgcccacctcagcctcttgagtagctgagactacaggtgcatactaccacacctggctattttttttttaatttttaataaagacaaggtctcactatgctgcccaggttggcctcccaatgtgttgggattacaagtgtgagccaccatgcctggccccatgtaatttaagtcatcactaataaaatgtatacatattgtacagtggtgacagttgttatattgtactttctgtttgtatttttattgttttttttttcttcaaatattcagcctgatctagttgaatctgaagatgtggacctgctgatgaagagggctgactgtatctaacttagggtcttgcatgcagctggcacttaatacattttattgactgttttagataacattcaacagataattcctaataaaaactcttaaaagtaggagaaaaaggaaacctgagtccttcctctgaagtggcaggaaaactagcctgggcaacatagcaagaccttgtctctacaaacacattttttaaattagctgcctgcctgtagtcccagccactcaggaagctgaggcaggaggatcccttaagcccaggagtttgatgttacagtgagctagatcacaccattgctctccagcctgggtgacaacaaggccctgagaagggaaaaaaaaggaaaggaaaggaaaggaaaaaggaaaagggaaaggaaggaaagagtagaagtattggaaaggaagagacaaaactatcattatttgcatactaaatgataaatgttagccaaagaagcctaagagaatcaactaagattttactggaagtaatgaggattcaatacagtggctatctacaaaatcaagaaatcagcacacaaacctcaaatacttttcccatgtaccaccaataactaattagaaaatggaagaaagatcccatttacaatggcaatacaaatgtatgaagaatttaggaacaaaaatacaaagatcttttatctaacaaaagatgtgtaagatctatatatggaaacactaaagctcttctgaaagacattaacaagaaatgaatacatgacatgagatagcacgttcctagaatgttgtacagatgtaaattctcaaattaatctacaaatttaacataatcctattcaaatcccaagatagtttttggtggtggctgtttttaagacagggcctcgctgtgttgcccaggctagagtgcagtggtacgaccacagctcactgcatcctcgacctcccaggctcaagcgatcctcccacttcagcctctgaagtctctcatatggtgtccaagaaatggtgacaaatctcacaaagggactaggctcagcagggctggaatattcagggaaggtgtcaagaagaaagatgaacttgagttggcttttgaaagatgcataggactcccacaggcagggtgaaataagggcattttagatggacaaacacacagacaaaagcagaaatgcgggtggtgtgactggggtttggtgaggggctgctgtggctggaatggagggctggctgccacaatcatggaaatggtaaatgaggcaaataaggttggactggtggcatagcatcaaggttgccagctttattaaatcactcttccaatatgctagcactggcctgttgggaaaagtaatacatcatgtaatcgaacaaaagacagaggcaagctccaggaatcggcactgtaaacaggacttgccccagagtagccagatgtaggctttaggtaagttgatgcaagctgagcatctctaatctgagggggaatgtctcacatggtgtccaagaaatggtgacacatctcacagagggtctaggctcaggagggctagagtatgagatgttccccctcaccagtgaacttaaaaatgtggccaacaatttttgtaaaagatggctactctgtagtgctttaactggacctatttagacaatgccttacacactggaggacgatactgtgtaaatctaataagtctacaagacaatacttctgtcttttggctctctccttcctctccagggtgatgacaactccgtgagggtggagattatacctctctcatcatttcagcaacaaggaaataatttagtggcagagtaagggtgacttggtgagtacatccaattgttgacatagttttgggtgggagaaattttgctattatatccacttcttaaaatagtctagtgggattaacttggtttcaattcacagagatctggaagcgaggatcctttaaaaatcctgaaatatacactgcagtaaaagaacaaagcatacacctcagccttaaatgactgaagtatgtcaagtagcagcaggtgggaaagtggctttggttttcagtttgtgagctctgaatccacacaaagacaggactgcattctgaaaacctgaattaattattgtccttacctcaatgaggcagagaagtataatcaaaatcgttagtattccagtcacaattaacgccaagatgagttttttggtatagccatatcctggaagttcttttgtgaactaaaaaaaaaaaaaccagaatgagagctaactattcaaaaccccagtattccaggtgagtagcttacaggttcttttttatttttttgaaagagggtctcactctgtcacccaggctggggtacagtggtgcaatcaccattcactagactcgacctccctgggctcaggtgatcctcccacctcagcctcccaagtagctgggactacaggcacgtgtcatcaacccagctaattttcttattttttgtggagacaggctttcactatgttggccaagctggtctcaaactcctgacttcaagtaatccacccaccttggcctcccaaagtgctgagattacaggcgtgagctaccacccccagcctacagttcatcttgtgccctaatctatttcactctctacatgagcaaagtgggagatcactgtcatgaccaaagttacatggccaagataagctatggcctgggagtcccagattcttctgtgtgggcactttcctgggatatgctaaatgatgggaaatctgggtctcatgtttctgtgtagtcctcacctcaagcgacttctctttctgttcactctgggcttctgtgctctcattaatgtagttctcagtcttccattggtccgtatcccattctatcttggatgcctttacttcctgctgcccactgagaagcttcatcaggtggcctgtcctggagacgagcttggcacaggtcacttgcacatgggccccagagcagtccatcttcaaggtccggataacatgagcaatgagccttctcacattgttgttggggataacggactgcagctgctgggttagctgaatttcaaactgatcacctggggacgagagcaatgggtaattgaagcttttgggctcgggggacaggtcagtgcccacgttgttgtattcccattttgtctcagtttgtttaacagttggccctaagttgaatgcagtcccagcggaatctgcctcaggaggatgattgtagtttgtgttttcagagatggttccttctggcatgttagtgttttccataaaaacattttcttcaaaggcatttcttgcagttgtgtcttttgtattattgttttctataaaatgttctgaaggagcagatacttccagaaaaggattttcttgaggactcaggtctcttaaggatgaaaaagccccttgtgaaggggaatttatgaggctcttcgctgcagagaacggaagcctgtttgagagcatcagtctactcagataacttttctttctgacctttggactctttttgaccttgggtgttctgtgggtcatgcgggagcgagttttgtgaaagcggtatttttttctggaatgtacgatgggtttagatgtcttcatatttgtaactctagcctttgcactttctaaaatggaaatagcgtgggttaagtctttccatctgtctctcacctgtggtagggcttttgcagggctggaggtagaaggcgcgcccttggagaagggtttcagcacagagactgctgccttatgctcttgggtgaacgaaggcttggtgtagacggcgtttcccgctaacttctcaggcccctgctgtgtgtgaggctgtttcagctcccttggggctggacttccgagccttttttcttcggcagtgttctccacagatgcctgggcaccctgttccctcctgatgctctgccttcctacctctttgaagtgccttttctggatgctccttgggcccatgaggactctattcagtctctgccggtttttgcctacagtttgaatctttgccaggctgtttcctgtggttggcagtttaatgaacggtagtaacagtgatttcacatctaggttaacggctgagaaataaggtaagatgtaacttagtgtactggtaacatcactctcgtcattggtgtctagctgctcactcccaaagcctgacaagttgatgccactgctgtctgagggctcctccggctcaataatcagctcagtgcttgtgtaattcttccgggcttgtaacaccttcatgaacgctccttctggattccctacagatgcttcttcagctgtcaaaaaagaagagactgctttgatcatgaaagatgatgggatgggatgcatcagtccatagctgtacactccagtcacacagagtaggagtcagcaaacattcgagtgccattcagagaggagaaacacacactcaatcctaaacctatgaaatggcaacaacaaaaggagaaaatacatcttttgaaaacacggccacctacttggaacattccatagtgtgacatagagtaactctgtttaggattatttcgttgatccccagaggccaattgcccagtgctcagtcaaagcccaaggtggaagacaagtgcttccctgatgagctggcctctctgcagactgctccgtaccctgtgctgtcctgcctcagatgcagagagagcacaaggctcctgctcacctcgtcctcggtgcacctgtgttcttgctaccatcacagctgaatgcaatgaaaggcggtcctctgagaggagcagggtggagatgctaaagtggaggccccctcccattgctgacagatcctcatctggcatgcgctccacccaccccattctctgctcccacgtgtggtagccccatcacagaagatgcgacatggaaaaaagcactgtgtccaccctagttcttaaatttgggcagggatttggggtgtatgttaagagtttttcaaatttgccagattgtatgcctatgttgttaaatacacagtgaatctctggtatgatagcagtttcgggataaacattacttgaggtcctaaaatgcagaagggaaaaagcaacttttgtcagatgcttactttgctttcatttcatctctaatattttggatggggaatcatccaaagcttctgactgcatgaaggtcaggtgtgccagtgtgcagctgggtttcttttccagaattaaaagtactttgggtggtggtgagggtcagaggaagaagtaaagattgtgagaaaggggaagaaacatgggcttggggagaacccagaattggggccagaagacctgacactaggctacagcacttagcacctctgatcttgtttttcctcatctgtaaaaggaggttaacaaagcttttctgcccgcttcttggggagaagggaataacataattggtaaaaaaaaaaaaaaaagttttgaaaaataagcaacactgactttatgtaaccaagcattattaattatccaccccatatcactggtagatacctgtattcaagctatctggacatgaaagcagtcacattttagaagtcatgaagttgatgctaataaacctaatctacaaaaatactcttgaaagcccttgagcatttgtgaacagaaaggtttgagattcggagcaagttcagagttggatggtctaagaatggaaaagccctccattccattagaagagccaggtagcaatttctggttatggaaccagaagctctcaggcttcaaataaaacagcatcacttgtactcttataaaactgtaaaaacagaaagaccaaaaccgtatctacatctgtcctataaggcagagagtacttgagatctcatggatttaaaaccagcttacaaactacattgcactatatgaagaaattatcactgtgggcaaagcatcaagcagagagcacagtatacagtgtgtggatgttaatgttattccctagccttcccattcctttgtcttggtcctttgtgcatatggaacagttctattattaaattttgtaatagtaactgagaacctgactctcagcaagggagtagttcagaaattgagggagtttaactctgaatgagtaaataaaaataaagcaattatgtcattagcttaaaattttatcatcattaaaaataaaaagtttaaaaacaaatacttaatgtaacaatttatcaccatgcaatttggactcacgacaatgtgtggtgtttgtcagacatgcactgttgcaatgcagcttgactgtcttgcagacagcctcaatgctgtttttaaattggcagaggcagcaggccatatggctaggtacgatcctatagatgaaaacagagagcaataaattagcggtaaagcggttacttgagtaggtaaaggaggcagccaacactaccacaggggtgggaaaaaggtatcattgaagcctgtggactggacagttgggtaggaaccagaaggccaataggaaggaggacaaaagtgcccaactgaagggtaagcatggcagtgagtatggtatgcctagaataaagatggttgggattagaattgggtgacagtgattagtagtttcagaagtatctcttcccaactcaaaagtctcactttgggctgaaagtacagaggaagaaggtagacttttaagaagtctgaataagcccccaacttccggagtccctttctcaattcctgttgggagtgggaaatattataaattactctgggcattaaaaatagcttagtttaacctggattgcggagttaaaaaataacaaagactgcattggtcaaatctggacaatttgagcattcaaaagaataacaacaataagttacaacatatttaatataaagaagaatccacgaagagtgatattgaaaaagaaagagggggagttcttcttcaatgaaataatgccagctagtaaatgtagaaggaatgacagaatttttaaaagtgtcactttgcaaccgtcagtgcaatacaaattcattcagacaaggattatcattgatgcacatttgggtgaaaagacatttgagaacaggatcttcactgaactcaaagtaacaacccacagattatttattaattaccaaggggaaaattattattttttatttttatttttattttgtcacccaggctgaaatacagtggcaaaattatacctcattgcagcctcaacccccctgggctcaagggatcctccaaattcagcctcctgagtagctgggagtataggcttgcaccaccatgcccagctaatttttttttttttttttttttttacttttgtattttcagtagtgacagagtttccccatgttgctcaggctggtgtagaactcctgggctcaggcaatcctcccacctcggccttccaaagtgctgggattacaagtgggagccactgtacccagcaaaataattacaatggagagatctggaagatcaccttagtcaagtgatcaaacttagtattacaggccatctgcggttacgaggcaggaagaatacatcacctatgcagtatttttcccaaaaatgcttaacttgaatttcgtcatgaggaaacagacaaatccagattgtgggacaatttacaagacaactatctttgactcttaaaaaatgccaatgtcatgaaagagcaaagaaagtagaggcatgttttagattaaaggaaatgaagacatgacatgcagtgcctgatctttgattggattctgtactattctttcatctttctggcttgtttgaatttttttcaatacgtaaatttgggcaaaagaggtaaccgagacaactgattaatttattgttgtggcttattgggggcactttcagagagataaaaacaatccctgtaactgaagtaaaaggttaatcttaggcagtatagcatggtcattaagaatacagattccatagccagactatgcttcaatctcagctctgctaataatgtgaatttgggcaaattgtttaatctctgttccttggccttgtcattataatagtacctacctctaatgaattttgaggatcaaatgaatcaatacctgaaaaatgcctggtgcacagtgagtgctcaataagagttaactataattattgtgttgcagaggttgtggggggccttttctgagtcctccaaaaggatggctttattggggccatattaagactgtggaaacagaagagggtttcatggatacaagaagtctatgagttgggggtacaatgtatagagttttagattaaaactgcatccaataagttggcctgacacatctttcaaacctataaaggaacaatcacaagtgactagtattattcctttgggtccagtggaagcctctgatcttcatatggaatggacccggaaccgtaacccagcattttgttatatagcaactttacctctgccacaaaggtgtttcttttgtttattttgaggccaggtctcactctgttacacaggctgagtgcagtggtgcaatcttggctcactgcagcctctgtctcctgtgctcaagtgatcctcccacctcagcctcctgagtagctagaactacaggtgtgtgccaccacacctggctaatttttgtatattttgtagaaatggggtttcaccatgttgtccaggctggtctcgaactcctgggcacaagcaaccctctctctttggcctcccaaagtgctgggattacaggcatgagcccaaaatttttgttattctttttctgcccccaactttttattttaaacattttctttttttcctttaagccttaggatggctgggaaacattttcaaatggtataatgaacacctgtataactttcatctggaatcaatagttgctaatactttgccacatttgctttccgtgtgtgtatgtctatacattttctggacaaaaccatttgagagtcagttgcagacataatgacccttcaccattgaagacttcagtgtgcagcccctaagaaccaaggcattctccgacataaccagaggactgtcatcactcaatggaacttcatattatcattgtctactatgcggtccgtatacacattttcacaattgtcccaatcataacatggcttaaaaaattcagaatccaatcaaacatcagacattacatttagtacatgattctttagtctccttcaatctagaactgttcccaggattgttttaaagtatactgacaaatctttgagactgtaaatgacctgaggtatacttgagaataatttttcaatacacatgaaagatcattacacatgagccaagactcaaatgagctggcctacttactttgtacataaatgtgtaaactcctgaagacttccaataatgaactcccataagacagttagttcaatgtctttatggccttggtgacaaatcattacagaggatgagagcatttttcctatccaataatggtcaagaaaaaagcagacagatcctcactatcttagagaactaagtgagaaagctggtcgatgaaggggacttcatccagagaggaagggatccagctgacggggaagatgctacaggaggctgaggaaagtgaggctagagcagtaaaagagatctgacaacctggtgaagataagaaagtgacctgacaaaaatgaacggagcagagtgctaaatgaagggccctttccatgctaatcttgcataatgccctcaaccagccctagcataactgagtctctatttagcttgccatattgtgggggctggtggcacaattgaagttgcagtaaattgtgtaacaaactcacaatagggccctgcaggcatatatatacatatatacacgtacatatatatatatatacatatatacacgtacatatatatatatatatatatatatatatatatatatatatttttttttttttttttttttagacagggtcttgctctgtcacccaagctggagtgcagtggtgccatcttggctcactgcaacctccacctcctgggttcaagtgatcctcctgactcaggttccctagtagctgggactacaggcgtgtgccaccacacctggctgatttttatatatatatatatatatatatcctgcaaagaaggccaggcacggtgtcccatgcctgtaatctcagcactctgggaggtgaggcaggaggatcacttgagaccaggagtccaagaccagcctggggaacatactgagacctcatttctacaaaaaaataaaaaataaaaaagatacatcacatatgcaaattaactcaaaatggatcatagacctaaatgtgtatcatttctgggagaagacataggagaaaatcttttagatgctggattagacaacaggttcttaaagatttcttaggtaagaaacaaaaaatcacaagccatttaagaaaaaaatgctaacttaaagctggtcaaaattaaaaacttctgctcttcagaaaacatttttatttcttacttttttttttagacagagtcccactctgtcgcccaggttagagtgcagtggtgcaatctcggctcattgcaacctccacctctcaagttcaagcacttctcgtgcctcagcctcctgagtagctgggattacaggcatgtgccaccacacctgcctaatttgtgcatttttagtagagatggcatttccacacaaccggaatactactcagcaataaaaaggagtgaacagttgtcccgcagtgtctgcaggggattggctccaggaccccctgcagatagataccaaagtccacagatgctgaggtcttttttatgaaatgacataatgtttgtatacagcctcaggtatactctaagtacctaatacagtgtaaatggtatgtacataattatactgtattttaaattttctactgtttttattgttgtattgttgttttatatattttattttttccaaatattctccatccatggttcgttgaatctatggatgaggaacctgcagatatggagggccagctgtagtgataggtgcaacaacatggatggtagcataatctcaaaaaaaattctgctgagtgaggccaggcaaggtggatcttatctgtaatcctagcactttgggaggctgaggcaggcggatcacttgaggtcaggagttcgaaaccaccctggccaacatggcgaaaccttgtctctactaaaaatacaaaaattagccaggcatggtggcatgtgcctgtaatcccagctactcggaaggctgaggcaggagaaccacttgaacctgggaggtggaggttgcagtgagcctaggtcatgccgctgcactgcagcctgggtgacagagtgagattccatttcaaaaacaaaaaaaaaaattaggctttgtgaaaggagccaaacacaagaggctacgtgctatatgatttcatttataagacattctggaaaaggcaaaagtataggaacagaaatcagattagtagctaacaggggctgatggtgggaggatgggattgcctacaaagggacaggaggggcctttttgaggcatcagaaatgctttatattgggaatgtggtggtggttatgtaactatacatttgtcagactcatcaaactgtacacttaaaaagcgtgaatgttactatatgaaaattatacctcaatgaacctgacttaagaaaataataaaacaaacctaaagaaacaactacgtaaaaataaatctcggaaaaaaataacttacagtttttccagttcaacagtcatcatgagaatgttcttaagtgttgtaagtgggactagcgttgttcccatgtctctgaagaagaaagccgaaacattcatgatatgagccccaataaaaaattctgtacttaacaattcaattttggcttctctattaaacaagccagctcaagagtttatttgctgtagaattccagggagctcttattaaagaaattaaagttgatttgcatcatcaaattaatgatactcaagagcagaacttacactttttttttttaccattatcttctcattttcatattgcactcaccatcttatttactcttttctttatttttagaataatgaacaccttttcccctttgctttcttggttaaataatattcctccatgtgtctacatgttgcaaatctatatgggttcttcaatgctgttctcttcccctgctggctgtcttgaccattatacatcctcttaatttttttcttcgccaataactttttttcaataacccagttaaaatttaaattatgacattttagcctaaatgcaaaatacttaagctttgatgaaaaatttaaaaagcataaatcatctcttgactcatgagagtactatagtacttacagatattttaatgctggcaatttaaagagatatggatcttcaacagttgtcagaggattgtgattgagaattctgaaaaatggaatggaattaaaataacctgcattttcaatgtgtaaaactgcatgaaaagtttacattcattttttggtatggaacttgtaggtaaaaaagaaaaaaatgtttcctgtctttacctaagaaatcaccattagactccgtaaagcactattcctatgggaactaccgaggtctctagaagataaaggatagaacgcggggaagaactacaaggaaaaaaaaagtggatagcaaagaaaaaatatgccacagaacttttcaggtcaaaaaccctaaaagtgactatgttggtaggaagccctgactgcggaggaaacagtatttctagcaacctccataattcaagttgttcatctattttttttttttttttttttgagatggagtctcgctcttgttgcccaggctggagtgcaatggctcgatcttggctcactgcaacctccgccttccaggttcaagtgattctcctgttctgcctcagccttccgagtagctgggattacaggcacccaccaccacgcccagctaatttttgtatttttagtagagacggggttttaccatgttggccaggctggttttgaactcctgacctcaggtgatctacctgcctcagcctcccaaactgataggattactggcatgagccactgcggctggctgcttgtcttttatctttataaagtttttaaaatttatggtttaatttgcacagttaaaaaaaaataggaccaattattttgctttatagccaaagaaggaataaatctaagaggaagaactggtcaaaaccatactcccacttgtcctcttgtatgacatcacagcctttcttacattgcatgtaatcacctgtccacttgtcaggctcctggactatgagcgctttgagggcagagaccacatttttttttttttttttttttttctgagacggagtctcactctgtcgcccaggctggagtgcagtggcgcaatcttggctcactgcaatctccgcctcccaggttcaagcaattctcctgccttagcctcccaagtagctgggattacaggtgcccgccaccatgccctgtcatccccgtgcctggcatgatgtctgaaatgtattaggcatttaacaaatgtttattgaataaacaaatgacattttgttcatatgtcaataaaatgaataaattgattttgatgcaaatttttattccaaaatgctggaatcaattttctttttaattctttaaggtgaacaagaaaaataaaagaaacaggaagaaataaaagaaaatctacctttaggttaacccaagaatcatctttgtacttaggcagaaattataaaaataataattattacagtgagtatctactgggttgccaggtatttgtgatcagcaaataccttatgtggtagatattattattgccctatttttaaatgaggaaactgaggcacagagaggttatataacttgtcctaggtcaccaagctattaagcagcaaagctgtaatttgaactcatgtgtttaatctgtatgaagaaaaagggtttattttaaccttaggttttttaaaaattttcattttcgttcttcattctttttctttctctctctttttccttccttccttccctcccccttccttctattttctttcctttcctttctttcctttctcctctccccttcactcccctcccctccccacccaaacagggtcttgctccattgaccaggctggagtgcagtggtgtgatcttggctcactgcaacgtcctcttcccaagctcaggtaatcctccttcctcagtctcccaaatagctgggactataggcacgcaccaccacgcctggctattttttgtgtttttagtagagatgggagtttcaccatgtttgccaggctggtcttgaactcctgatctcaagtgatccgcctgccttggcctcccaaagtgctggtgtgagccactgggcccagccttaattgtgagaagactaaatacagaagtgcctttcaaccttcttctactcctctgggaggacctctatgagaattacaatttctcattagcagggcacggcagtgcttgcctgtaattccagctgtttcagaggctgaggcaggagaattgcttgaacccgggaggcggaggttgcagtgagccaagatcaagccactctactccagcctgggcgacagagcaaaaaaaagtggattacagtttctctttttatgtctttcccctaatcatttcccatgattaaatagttaattagtctatggtcaatgagactttttttttttttaagagacacattctcactcactgtgttgcccaggctggagagcagtggctattcacaaccatgatcccactagtgatcagcatgggagttttgacctgctctagtcctgaactgggctggtacacccctttttaggcaacctggtggtctccttttcccgggaggtcaccatactgatgctgaacttagtgcggacacccaatcagcatagcatgctacagcccagaattcctggactcaaaggatccttcttcctttgcctcccgagtatctgggactacaggcatgtacccagtgagccttcagagatttaaaatcatgtcgtaagtgacatcagtgaaaatggtggaataaagacatccaggctgggtgcggtggctcacgcctgtaatcccagcactttgggagaccgaggcaggcggatcacgaggtcaggggatcgagaccatcctggctaacaaggcgaaaccccgtctgtactaaatatacaaaaattagctgggcgtggtggcaggcgcctgtagtcccagctactcgggaggctgaggcaggagaattgtgtgaacccgggaggtggagcttgcagtgagatgagattatgccactgcactccagcctgggcaacagagtgagactctgtctcaaaaaaaaaaaaaaaaaaaaaagagagacatccaaaaattcatcccttcataaaagcaacaaataccaaaaaaatagccaaaaaaaaaaaaaaaaaaaaattgaccagaataaactttttcagaactctagaaatgtaaccaaagtcttgcagcaacccaaggagcatttattcaagaaaaatttctgtaagaatagtgagatttgtgttaacttgccttagaccattcctcactctctagctcagtagtcgccttgaaaaacagcccacatccccaaccagagggagcagaatggagatggagctccttcaaagccttattctcagttaactgtcatgatgtcatctgtctggtggttccctggaagacctcatttgaaaggtctgtctttatttgaccagaatgaaagctgtctagtgctaaagcctctccacagagggtgtttttggaaaacaattacagacaagtgtttgaacatggcaactgtattcggcaatgaataacagtttgggggaaaaaagcctaatcaaaaagcttaataggaaaagctgaggaataagatgtccacaggaatttgaaacacactgatatatgcttgggaaactagaagtccataagacatattcctggcaatttggaatctcacgcgcatgcatagggcagactgtcagcatggtcaggaaagacctactaagttcataaactctcacccctggctgacaccttgaggttctgcacaagcaagaagtgaaagctaaggcatggctgtaaattgtctagctgagtgctgaaggtatgccccaacatgtacacagagccccttggcaaaaactaggagacttatcagttccaaggatttaagtaaatcttcatttaatcattagctgatcagtaagctaaccgaggagggactttagtgggaacacatgacatataatgcgagactttacagaagaagttcagaaaagtcactaaataaatagcaactactaacacaagcaggagtaacaccaaaccctggcagcatggatctgattttcagaattgctacattatattatttaaaatattcaatttttaacaaacatttatgaaagatgcaaggaaacaaagtatggcccaaacacgtggttgggggagaaataagcagaaattgtccctgagaaggaccagatgttagacttactagacaaagatttttttattttttataggtggggtcttgcgaagttacccagggtggtcttgaactcctggcctcagcctcaacctcagcctcagcctcccaaagtgctggggttataggcacaagccaccatgcctggcctagagaaggatttaattcagctatttaaaatatgttcaaagagataagagaaacgattcagttctgtagactagagaactaaaggaaagtatgaaagcaatgtctcatcaaatagagaatatcaataaagagatagaaaccataaaaaggagtcaaatagaaattctagagttgaaaagtatggtaactgaaatggaaaaattattagaggttctcaatggcacattacagcaggctgaagacagaatggggaacttgaaggttaattgagattgttgactctgaggaacagaaataaaaatgaatgaaagtgaatggaatctcagagacctgtttgtggaacacatcatcaagcttactaatgtacacataatgagcatcccaggagaagaaaaacagaaaaaaggagaaagaatatttgaagaaatgatggccccaaacttcccaaacatgatgaaaaacaatctgcatattcaagaagctcaaggaactacaagtaggaaaaactgagggatccacatctaaacatactgtaatcaaactgacagaaggcaaagacagaatatcttgaaagcagcaagagaaaagcaactcatcacatacaagggatcctcaataagattaatagctaatttctcttcaaaaacaatgcaggtgctgggcatggttgctcacacctgtactcccagtaccttgggaggcttgaggctcaagaattgcttgaagccaggagttggataccagcactggcaatagagtaaaaccctgtctctacaaaaaatttaaaaataactgggcatgcccgtctgggatgtgaggagcgcctctgcccggccgcgaccccgtctgggaggtgaggagcgtctctgcctggctgccccgtctgagacgtgaggagcccctacgcccggcagccgccccgtctgagaagtgaggagcccctccgcccggcagtcgccccgtctgagaagtgaggagcccctccgcccggccagccgccccatccgggagggaggtgggggccagcccccgcccggccagccgccccgtccgggaggtggggggtgcctctgcccggctgccccttctgggaagtgaggagcccctctgcccggccgccaccccatctgggaggtgtacccaacagctcattgagaacgggccatgatgacgatggcggttttgttgaatagaaaagggggaaatgtggggaaaagatacagaaatcagattgttgctgtgtctgtgtagaaagaagtagacataggagactccattttgttctgtactaagaaaaattcttctgccttggaatgctgttgatctatgaccttacccccaacccagtgctctctgaaacatgtgctgtgtccactcagggttgaatggattaagggcggtgcaagatgtgctttgttaaacagatgcttgaaggcagcatgctcgttaagagtcatcaccactccctaatctcaagtacccagggacacaaacactgtggaaggccgcagggtcctctgcctaggaaaaccagagacctttgttcacttgtttatctgctgaccttccctccactattgtcctatgaccctgccaaatccccctctgcgagaaacacccaagaatgatcaataaaaaaaattaaaaaaaacaaaaacaacaacaaaaaaaactgggcatggtggtgcatgcctgtagtctcagctacccaggaggctaaggtgacagcattgcttaagcctgggaggtggaggctgcaacgatgtgagtggttgcaccactgcactccagcctgggtaacagagcaagaccctgtctaaaaacaaagcaaccacacacaacagtggaggacaaaaggcaatgaaatggcatattcaaagttctgaagaaactgtcaaccaataattctatacctggcaaaactacctttgaaattgaagagaaattaagatattctagataaataaaaactgagagactttgttgctagaagacctgccctataaggagtactaacgtgaatctacacaaagaaataaaaaacactggctgggcgcagtggctcaggcctgtaatcccagcactttgggaggctgaggctggaggatcacttgaggtcaagaggttgagaccagcctggcaaacatggtgaaaccctgtctctactaaaaatacaaaaattagctgggtgtggtgttacgtgcctgcagtcctagctactcaggaggctgaggcactagaatcgcttgaacctgggaggcagaggttgcggcgagtaaagattgtgccactgcactctagcctgggcaacagagtgagactctgtcccaaaatgaagaaaaaaaaaaacaaaaagatacttacataatgcaataattataaatctagttgatgaacataaagtatataaagatgtaatgtgtgacaataacagtataaaggagggggtgagagtggagctttagagaagcaaagtttttgtataccattgaaacaaagttggaattaatctgaactacaacgttataaaattaagatgtagctgagacgacagatgcgcaccaccacactcggctaactaaaaaaaatttttagagatagggtctcactatgttgcccaggctggtctcaaactcctggcctcaagcaatcctccttccttggcctcccaaagtacagggattataggtatgcaccactgcatctggccacaaacattttgtttttttactgttcatttttcaagacaggttttcactgtttcccaggctggagtgcagtggcacaatcatggctcactgcagccccaatctcccgggctcaagtgatcctcctgccttagccacctgagtagctgtgactacaggcatgtgccaccacgttcagctaacttttaaattttttttgtagagataagctctcagtatgttgccctggctggccttgaactcctggggtcaagcaatcctcccaccgcagcctcccaaagtgctaggatgacaggtgtgagccactgcactgcaaaaatacagaagaccaaattattaaaattagaaatgagaggggacattactattgttcttagagacataaaaaggattataatatgaataaaaaggattatacatatatacaatatatgctaataattggataagctggatgaaagacacattaccagaaaaatatgaactactgaatctgacttgagaaaaaaacagaaaatctgaatagacagacctatgtcaagtaaagagattgaggtagtaatcaaaaaactttccactaagaaaagctgaagaccagcaggcagcctcactggtgaatctaccaaatacttaaagaagaattaacaccaatccttcataaagtctttcaaaatacagatgaggaaagaacatttcctaacttattctatgagggtgatattaacctggtatccaaactaaagacatcacacacaaaaaattacagaccagtatttcttatgaatgtagatggaaaaatgcttgacaaaatctgtcaaaccaaattcaacggagtattctgtaaacatgaagccgataataatagcacgattctccaaattgatctatggtttcactacaattgttgtttttttgagtgaaaaagttttcatttattggccgggcacagtagctcatgcctgtaatcccagcattttgggaggctgaagcaggtggatcatctgaggttaggagttcgagagcagcctgataaacgtgctgaaaccccatctccattggagtctcactctgttgcccaggcttgagtgcaatggcgtgacctcggcttactgcaacctccacctcccgggttcaagtgattctcctacctcagcctcctgagtagctgggattataggcgcctgccaccacgccctgctaatttttgtacttttagtagacatggggtttcaccatgttgtccaggctggtctctaactcctgacctcaggcgatctgcctgcctcagcctcccaaagtgctgggattacaggcatgagccactgcaccctgctaacatatcctctttctaaaaagctacatatattgcaaagtattggagtgggaataacatagcagttaggttgggcatttgggttgattacatatctgctattatcagtacagttcttatcaaaatcccagctggcttctttccagaaagtgacaagctagttctaaaataataatgcaatttaaggcaccctaaatagcaaaataatcttgtaaaataacaaagtgggaagacacaaatgtcccaatttcaaaacccaaatcaaatccacagcaatcacagtgtgatactggaatgtggacagacaaataaatcaatagaatagaattgacaacccagaaataaaccctcacatttatggaaaattgatttttgacaagggtgctgaaacaattctacgtggaaataatgtttttttttttaaaatggtgctggaacaactgaacatctatgtgcaaaataatgaaggtggaccccctacatctcacacgattataagaattgatgcaaaatatgtcaaatacctaaatgtaagagccaaaatgataagactcttacacaaaaacatgggagtaaatctcatgaccttaaattagacaacaattttttcctctccaaactggattttttttcttttaaaacaattttgtcttttgaatttaatgaagtattactagctgaaggcagcctgacatggtgaaaagaatgtcagacagatgaaagggacacagcctgatttaaaaccaaacactgaacctttttaaagaagaataagacattttatacacacacatgacaccaaaagcacaaacaaccaaaggaaaaatagatacattagattttatcaaaattaaaaacttttgtgcatcaaaggacactggcaagaaagtcacagaactcacaggatgagagaaaatattggcaaattatctgttaaggtctaatatccagagtatccagaatatatagagaattcctataattcgataaaaagacaaatcaattttttaaatgggcagaggatttgaataaatatttcttcaaaaaagatatataaatggctcatatacacataaaaatgttgaatgtcttaaatcattagggaaatgtccatcaaaaactgcagcgagatactactttacactcactgggatggctatgagaagagacagacaatgacagtgttgacaaagacccggagaaattgaaaccctcaaacattgcagatggaagtgtaaaatggagcagccactgtggaaatcagcctgacaggtcctcgaaaagttaaacataagagttgccatatgatctagcaattctgctagggatgcaccctagaattaaaaacatgtccacacaaaaagtagtagatgcatgtccatagcagcattattcataaaagccaaaataaagtagaaacaaccacatgtccactaagtgatgaatggatgaactgatatagtgatggctccatacaatggaatatcactcagccttgcaaaggaatgatccatgctgcagcatgggaggaccttagaaacaacatgcttcgtgaaaagaaactagacacaaaaggccacatactgtatgattcgtttatatgaaagatctagaataggcaaatccatagggactcaaagtagattagtagttacctgggcctgcgggaagacagcactggggagtgatggctaatgggtaccatgtttctttttgggatgatgaaaatgttctggggttagataatggtgattgttttctatacaaccttgagaatatactaaccaccactgaattgtacactttataatactgcgttgatggtatgtggatcaagtctcaatgtaacacaaagaagcatgttgtactgtatagaacaccaggtgccagaagaccaaacatgctggcagatggaaaaaagaggagtgaagattcactctcccttgaccaagatcagagtgagtcagtggcgaggctgggagccacacagcttgtcctgccttgtgatccccctcctcttcctattccatatggtttttcagtgccattaacttgttttgtaacactaatattcaataagatgatgttacaaagagaaagaatgtgagtgccacatgactggttaagtatggattctcaaactagggctttaaatatccttcgtgattttttttggcatgaaaacttgtaagaccactggtgggctctgtacaaagtcggctaccccctcattctatatcttcctctgcccactttcctcccagctattaaaaatgaatgtaggctgggcacagcatctcaagcctgtaatctcagcactttgggaggccaaagcagaaggagagcttgagcccaggagtttgagaccagcctgggtaacaaagtgagaccctgtttctattttttcttaaacaccaaaaataatgactgtaaggcagtatgtagccaaacaacttagcaaagtttgttatctttcctccaaaattctctcactctccaaccttccctctttcttgatagctcatccatagccttgagctcagcattacctctgaactaggaagctcttctccagctgacattaggatctttgcatttgtccctaatgaaatcaaaatatagggccattcgatattatcctattttcctcctgttctaaggcattcttttcttgactaaggttgtgcctgggccgtggagagactgagtgggaactggctcaacggctcaagtttgaggactctacagcaactcttttccacaaaccaaatgatatgaatgcttttatttatttatatttatgtttccactttttaaaagtctttttgtagagattggggtctcactttgttgcccaggctgaacttgaactccaggggctcaagcgatttgcctgtcttggcctcctaaagtgctgggattaaaggcatgagccagcgcgcccagcctcgagtgtttttagattcacagtagatgatcatttccatttctggttcaagtccttcattttatacattaaactaaggtgcactgactcccagtccatcgactttttggtatctttatgggagtaaaatgtggcaagctttttttcagcctcaaagactgtctcagagtaaaagtttaagaagtactgctctaaataattttattaaatatgccttattagatgaggaaaactgaaatatttttatataagccttttgctgtagaacaatgggacagaataaaggtagctcacaaaataagggaacatttcttgcctgtttttttttttcccctccaaattcttctacacaggtccagatagatgggctatgtttcctttctattaactgaggagacagagatgaaaggactggagcatgtcatcactgtcttaaatgtactgaaattctaacagctctagctgaaaaaatgtccaaagcaggccgtgaaaataaatttaaatgacaaactccaaaatgatctatgctagaatcccaaggctgtcagggaaaactggttccatggaagaaggtagtcaaagaaataagcagatgacctagaccctcacccaatatgcgcgatgtacttggggagaaagtaacctctttcctttattcatctacataggttcgtgagccacacatctccccacaccaagctcctccatacaagacctcggactgcatcacgtaaatgctttttcaggggcaaaatctagagaatctgaaacagtgagcctttttcttttcttttcttttcttttcttttttttgagatgaagtctcactctgttgcccaggctggagtgcagtgcagtggtgtgatcttggctcactgcaacctccacctcctggagtcaagtgattctcctgcctcagccttcagagtagctgggatcatagatgcccgtccccatgcctggttaatttttgtatttttagtagagacagggtttcaccatgttggccaggctggtctcgaacttctgagctcaagtgatccacccaccttggcctcccaaagtgctgagattacagcatgagacaccatgcccagctgtgagcctgtatcttaatcaaagtcctgagaataaccttgaagaagactcccttgcaatgagcaacaacagaagaagcaagggacctggaatctggcagacctgggtttgaattctggctctgtcactttctggtgaagtgacttgagtaatgaacatgagcctttctgggtagcgtttacagcacaaagcaatttgaggaataaatgaaagagcacgtctagtgcctagcaatgcgctggacacagtgccggtgctcagccatcatgtcacaccagcactgaccggtgagcataaaccctggggatgcccagagctggtacagccaggagctccagaagcgtgggattctcagagggaagtggagctcactgctctacaggtcctattcaagttagaaagtaagatacaatgcacacaaagccaaattgtcatcattcagctcctattacaggggaactaagagctgcattgaaaattatttgcaaagcttgtaagtggttctgccacttattagccgtgtgaaccttagcaaattacctagcgtctctgagtttcaacttcctcatctacaaaatagaaatgataataataaccgcatcgcaagagttgttggaaaaatgaaaatgaggtatcataggaggtaacatgtatggagcatttaccataggccaagcactgttctaagaacttcggacatgttatctcacttgtataagtacttaggtgcctacaacataaacagcacctggtaaattaagtattgaaaaaatgctatggggcagaggaagaaatgctaagcttctgtgagaagagaagacagcttgttacacaggtgaaaagaacaagctgcagctgagagaagaaaagtataagagttgttaggtgtgacaatctcaagacttttcaaccactacaaatttaaacagccaccctaaatcaccccaaaggacagactcgagttgttctttttgtctttaatgtttgcacctctccgaatcagagaagaagctgccaggattccagtacataccaaaacatgatgacaataccctcaactgtgcaaacttttgtgcatctaccgctatgtaaaggaagctgatgtcagtagactggggggaacagtaaggcatgtttgtgaccgaagctcaatttgccatcacagtgtggccacacctacctcactaatattctaatagtgggataaataattcaatagggataaagcctggattttcctcttattcttagtgcttacattcttggcatgatatcgatgtgccatagacaagccaatatgtgagtgtactctatctgaataaagtatagcctttctacattgcaaagtcatccagtttctaaaattattgttagaaccaatgaagtgactaagagaattttaaaaaataagccatcagtctggacctgtgtataggaatgaaggagaagcactttaaagtcagggaaaaaatataaacatacttaacatttaggattatcaaccattgctgcttttccataaaccatttcattcatgatttcatctgtaagagatatgattattgcccccattcagtgaggggctttgatagttagccgcctggtccttcttgcttggatgccctgcaaataaatgtcctcctttccccaatgcaaaacctcgatatggttgtttgactttactgtgcttgggccagcagaatccagttaagtccactaataagctcttggcctgtctttgagatggatttcagattcaaaatagacagaccctatcaccctgctaacttggccagtcagtatttgtcaataacatagaggcttcattcaagagatttactgggttgtaactattggaacccagggatgatttcaggattttgtggggcctgagccttatctagtaaaaacattaaaaaaattatgactacaaaaatttccaggggccctcccaggaccttggaagggcctgtgcaagtgagaagcctggaaggttaggctctattcatcatcgatcaaccacagctggggcctctttttttgtttgttttttataaacttgtgtaatgcagggaaatatattgtttcaacttacaaacaccacaaaatggtgtcatattggtcataaaattactggcaccttcccttggcatcttgcctttggaaggaaatgcagtgggcctatatgtcacatatgccaaatatgactgcagtgtagctttgtttaccaggaagatttgactccaaaagagcccagcccctaacatacacttggtgtgttgagacccttgtgccaatctttgaaagtaactgtgacttagtttgaagggtacagctctattctgtttatatgaaatgagtgctagtttccaatatcagctagctctgattttttcatcaccatgaagcaaatgcctttttctgttgtttaagatgaacacagaaactcaagataagcaagttagtgtctctcaagtctttcttaacccagcccccattcctgctttgtcctctccttgtcaccctgccgtacagatccccacatggctctcatatgttttcccatcagcatccgcttcctccttgaggaatgaaagtcccctggggacaaagtcctcatcttggtgtgtctttgagatggattttgtagccccagcacttagtacagtacctggcacaaatggacatgacactctgaatgtttttgagtgaattcattaatttttatcaactgtgattccagtgttttcctggtgttgcctacataattgtagtgaagctggctagatgatgacgatgatgattattattattattattatattattattattatttgagacagagtctcactctgtccctcaggctggagtgcaatggtgccatctcggctcactgcaacctccgtctcctggtttcaagtgattctcctgcctcagcctcctgagtacctaggattacagttgcctgccaccatgcccagctaatttttgtgtttttagtagagacaggtttcaccatgttggtcaggctggtcttgaactcctgacctcaggtgatccacccacctcagcaaagtgctggaattacaggcatgagccaccgctcccggccaccagatttttatgagggactcccagttgtataaagtgcttagtaaagatggtgagtttaaaacatttgtattgatgctacctaaacctcttggtggagggacctaatgagcctgttctctggtgtgagggcaaaagaaaaacagacctttagtgtacttttcctaagttatgcatcagcaaattaatgaggacagaggggagcatgtgcagaaactgctgctctagtccagacacatcctgaatgcctccctctaacttgaaatgaactgtgtgaaactagatttctgaaccacaaggcaggtggaacgtcttttctaaagtcagatgtagaggagaatcttcaccttgagtccccttcaggccactgaatatacccactctgatttgatgggtatgttatacagagaaatcatagaatttttgcaattatggtagaagagtagtcaggaaagtatatggaattaagatacagcgatatattttctttacaaaagtttttttttgcacaatagcttaacataaacaccatcttggccaggcatggtggctcacacctgtaaccccagcactttgggaggctgaggtgggcggatcacctgaggtcacaggagttcgagaccagcctggaggggaggttggagggtagtggcacaatctcggctcactgcaacttccccctcccgggttcaagccattctcgtgcctcagcctcccgatagctaggatcacaggtgcccgccaccatgacctgctaatttttgtatttttagtagagatgaggttttgccatgttggccaggctggtctcaaactcctgacctccagtgatcctcccaccttggcctcccaaggtgctgggattacaggcatgagccaccattctggccctacaactttggatttgattcctgctcatatgcagagtttctaactgcttaaatgtctgcaacatttagctgcaaggaaggaagcttaacacaaagtcctccagggagcaaaaaactgcaccaccacgcccagattttttttttgtatttatagtagggacagggtttcactatgttggccaggctggtgttgaattcctgacctcgggtgatccacccacctcggctcccaaagttctgggattacaggtctgagccaccccgcccagcaacaaggctaatttgagggtcacttctttgatgccttttcttgcccatgctataggtcagaactaggacaagcagaggaggtcatatataagctacgtaagtctcttggcctctttgtaccttagcttccccatttgagaaaaatgaatggatcttaagacatgcttttcagagttgataatgggcttatacccagctacccaataattgtatgagtttttgtacataaatagttgtttacatgtattcatcttctatttcacttacaacttatgtaaaaactgcattccgtgccaggcctgaaatgttccaaagctgagttctgtaattacattgcaactaagatttctaaaaaaaaaagacacaagccaaagaaaaaaaaaattatttcagaacatttatcatttgccatgattctaatttatataggatggaacataacctcaatcctttctctatgcactaaggaaatctgactgtggaagatactggcttatgatttatactttaacactgcacatgtggtgcattagatacaaaacagtgaatgctcagtaaatacctgtgttaagtgatctttatttctctagaacaggatttcacaacttcagtgccatcaacattttggactatataactctttgccatgggggtttgtcttataccttgaaggatgtttagcagcatctctggcctttgcccaccagatgccaggagcacactcacagttttgtcaaccaaaactgtctccggacattaccaaatgccacctgagtgcaaaatcacaccacctgagaaccactgctctctgatgattcactaagatctgtgtaataattctcacaataatccttgctagagacaaaaaggatttgctgtataattttagtagctttctactggtaaaattttaatcatatttcaagaatagcaaaaaggtttataattaagttttataaaaattccaaatgtaatcaagttatatttgtaacttacataaacttcaaaaatggtagtggttcaaatgtatgtctttcaatagactgtattttattgcaggataaatctctaggaaaacgaaaatattgccttgattagttattaaatgtcaattggtatgaataacagcaagagtttagaataatactgaatacctgtttttcatctcaactctaaacgtttggacttgtatttgaacattccagagcccctaaccctgcccatacctctcctagagtctcaccttcatggttttaataaatatacaacataatagactttggaattaatttttcctgagagcagtagacttgattagatgcccttttgtagtgtcatcaaatcttagattatgagctcaaagattttatctctatatacacaatttctaatattaaaaaaaatagtcgggccgggtgcggtggctcaggcctgtaatccagcactttcggaggccgaggctggcagatcctgaggtcaggatatcgagaccatcctggctaacacggtgaaaccctgtctctacaaaaaaaataaaaaattagccgggcctagtggcacgtgcctgtagtcctagctgctcaggaggctgaggcaggagaatggcatgaacccaggaggcggaccttgcagtgagccaagattgcaccactgcactccagcctgggcgacagagcgagattccgtctcaaacaaacaaacaaacaaacaagtctcacatttctacaccttcttagtttaggtctgttttcctaagccacttcaatatcagaagaaataaaagacatcctttcacatcatttgaaaggaagctacccctttacctaatacataactttgaactaattcaaatcatattaatagaattaatttctatcatattaatagaaattcatttttggttttgtattgctttaatatttcataaaaaaaaatttcttcagttatacagtgatggagtttgtccctccctctttacctggatggtgtaacgttgtctggctgatgtctccatctctagtctctccctacctaaactatcctgcacacagtcatcatataaactctccagaagtggcttgcaaagaccagcatctcctgggaaattactgaagatgcaaattcttggtcccactctagaccaactgaatcagtaactacgagggtggagtccagaactgagttctaacgtgccctctcaatgactgtgatgcagatctaccttacagcgctgctgtggtaacacggttccccatgttggctcctcagcttggcattcaaagctctagaagatctggctccattttcctactctcccttcttgtactctacgggtactcatggcattccttgaatactttcctgtgttttgccctcccattttccttttgcaagtttagagtattttccccaagatgtctgtctggtgttacacaatggccctttaaagtcctattcaaatggcattgttctagtaacatcctcctgggtccaaattgaaggcattttttcctcttctatgttcgagaaacaatttatccctcctagtgcccacatccgtttcttcttcttaatgtagttattttttatcccatttcttctgagcataaactccctgaaagcatggactaggtcttgctcatctgcattgcccaccatgtttaaaactgacacatggaaataaagcaaactcaaatatttgtaaaataaatgaatagctgggggagtgagtagaaggaaaataactattttaaaggaaatgtagttttattatttcatggtctctgtagcactttggcatccacctgagggtctttacacccactttccttaagccttctatatttgaaagaatctgtttgcaaaagagcatcactaatgagcttaataaggattaatgacatacagacctctatggacaaagggtaagaatcaagctttcatagcaatgaacatagtatcttcttgtctctaaacagacagaaatacagggatccctttctggtaacagggctggggcgatcgttattttgtaattagtgaagagttaggggcatttctgatgtgcttcttagtgtaaacatttctagctctaccagttaaccatcattttaaacatctgttttaatataacaattcctgaaatgaaatccttaataccagtctattctcttggtagcttaatattctttataatattattgatataattcagctatttttaatatttaaatgttaatttaattccgattaaattaccaaaaaattctggattaatgatgttcaaatgaatgcaggtggtctccattttcttctcctttaggcaaccatctgaagttaactttagttcctttcatcctactaaaccaactttttgaaattttttttggtgaaggtcagacagtaaatattttaggttttatgggccacatatgatctctcgcatatttctttgtttcttttctttttctttcacagtccctttaaaaatgcaaaacccattcttaacttaatgggctatttaaaaatagaccataaattagattggatctattggttgtagactgaatagaaaaagaatgatatgtgaacccttataaaacaaggttcatatgggtgtcagtcactgctcagattttcttaccatgtgaaatgtttttgtctgtattttgtctatacaacttaaaaactgaaaatgcacaggaggtagctagtgctagagatgggctgagaccctatacaaacttacagaattgcagaattttattgctcaaagaaatctgagagattatctaatttgaaccccttattcattttacagataatatgactaaaaactcataaatataattaactaacttacaaatactggagggatagcaggccttcaaatgaatccttgtgtaattcagtcaagttattttctctgagaattctggaaaatgaagaagttatttctagattaaaatgcaaactacaactatttgctacacagaaccatctcctgcatgtggaggaaagctgggtcatggtcacttcaagatggtgggatctgctctgctttcattcaaaccttttcttatattttcctttttgtgtccatctctctccaccaccaccacaaacacacacacacacactcaagcacaccccttgaagagtgggtttcttcccaccaaattctattatttcatgcctcctctctagatcacaaaatcccttttagaatccaactctgggtggcaccaagatcagcagaacctccatttcctcctctcttttcccaaaccttattatgaaagccccacatggaaccatgtcagggctgcaagtgaagccattcaacctttttccccccatcaaaaaaattggagaactataatgtgcataaagtgcacataacataaatgttgtttatttaatttaatttaatttttgagacagggtctcactctgttcccagactggtctcaaactcctggctcaagtgatcctcctgtgtctgcttcccaaagtgctgtgactgcagacatgagccacctcacctggccaaaatattcagtttaataattatgaagcagatacccatgtaaacatcgttacaaaagatcattgctagcatgccagaagccccagtgtgcccctttccaatcatatccctctctctaaccctaataggtaaccactatcctgacctttgtaataattttcttgtttttaaaatgtagttctggcctggcgtggtggctcatgcctgtaatcccagcactctggaaagccaaggtgggtgaatcacccacggtcatgagtttgagaccagcctggccaacatggtgaaaccctgtctctactaaaaatataaaaattagctgggtgtgatggagggcacctgtaattccagctacgcgggaggctgaggcaggagaatcccttgaacccgggaggtggaggttgcagtgagccaagatcgcaccattgcactccagcctgggcaacaagaacaaaattccatctgaaaaaataaataaagcaattctcctgcctcagcttcccaagtagatgggattacaggcacccaccaccacgcctggctactttttgtatttttagtagagatggggtttcgccctatcggccaggctggtctcaaactcctgacctcaggtgatccgcctacctcccaaggtgctgggattaaaggcgtgagccaccgcgcctagcatatgtttatttttaatttagaactcatcgtggcttgtctatatacattgaaataatgatgtgacacacaaactgttgtgaaaaatgtcagttactttgaatgtaagcattttttccaaaatcacttatgtgtctaaaccaattccttctataaatcagtaagaaaatgataaaacaattcaacaggaaaatgaacaaaggccagaaaactcagagaagaaacacaaatgttcaataaacatataaagatactaaattaaattcatgagtaatcagaaaaattcacatttagatggaatcccttttattcatccataacttcagcaaaaagttggagaatacccagcggtgaaaaggtgttgggaaatgaatgctgtcatattctgctgacaatagagtaagttggcacaaaatttttgaaggcaactaaaattttatatctacatagtcttcaccccaagaattccatttccagatatctatgctacaggaatacttgcacatgttcacaaagaagcatgtacagggatttcattgcagcaatgcatgtaacaagaaaactaagcataatctaaacattcatcaatgggggaattattaaataaaccatgatgcatccatactatggattatgcaggagtttaaatgaatggggtgaccctctcagtactgggaagcaaagaaatctaaggcatatcatgaagtgaaagaatcaagttgcaagatgttaccctttatgcgaagaaaaaattttaaaaccacaaaacaaatctattttgctttatgtaaatatgtatgtaggtaaatgaggaaaagtctggaagcatgtatactaaatgcagagtagcattacttcagggatgagggagtagggcacaaggagagtttttgttatatctgttattgcatttttatatattaaaaatggaatcatgggctgcgggtggtggctcatgcctgtaatatgaacactttaagaggccaaggtgggaggatcacttgagcccaggagttcaagaccagcctaagcagcataggaagaccctgtctctacaaaaaatacaaaattaggtgggtgtggtggcatgcacctgtggtcccagctactggggaggctgaggtgagaggatcacttgggcctgggaggtgaaggctgcagtgagctgtgattgtgccactgcactgcagcccagaggacaaagtaagaccctgtctctgaaaaaaaaaaaaaaaaaaaaaaaaagagaacaaaaaggaatataaccatgtactatttgtatgataaaaaataaatttaaattgcctcttattttaaagagagcctaccaaatttaattttaaaataaccatacaattgcaatcaacagtggttgatttggggcgtggaggagaaatatctttcctcagaggtaccgacctcaaaattctggaccaagaaggatcttacaatgcagttagctttttgtcatatttggagagaatatactcacagtttctcggtccaactgtatgctttccatacatttccatcaatgtaagaaatatagtttccttggaaatttctgtgaagaaacacagtttatatccttgaataggtaggaaaacaatgaacacgataagtaaaagaatcattgcaaccttgttggggatattcagaaacagaaaataacacctgctttctcatttccagagctatcagcttcccagtttgcacaattcatcaagaaattatgcggggtcactggcacaaatgatgaggcatctcctggaagcttaacttcttatccatcccatctcttggacagatgatgccagttaattactttgaatgtaagtattttatctaaaagcacttatgtgtctaaacagacttctacaaatcagtaccaaaatggtaaataattccacagaaatatgggcaaaagcttatcattatcaacaaatgagaagaaagaaaccctatgccaggtaacaccaaagctttggcccagtgccctctgttgaaacatcctaggctttttctttccactcctattacaactgatctgatttggccccttcacacctcactcctagattttgctagacctttctattttgtctccctgaattaagcttttccttttggacactttacatatggattctaaaacaatcctctgcatgtctacacttgcacataatgcaaaaaacaaaataaaataatcttcctgttttgatcatgtaatctctcttgcttggaaactttcaatggctttccatacctcattgtgtaactttcaaactcctatagctgataatcaaggttttacagaatcgtatcttcattgctccctcacctaattctttgtagccacattggtctactaaattccaaccatacctgtagccatgcgtttgcctagactgtactcccatttttctcctatttaacaaattatggctactctttaagacccaagtaaagttttagcttacccatgtagcatctccacacctcaaggatcacagattctggcaaattctagcaccaatggtctgcattatcttttagtacttaattatatatacctccctttttatgcctattctctttcttccctcctatcatttttttttttttttttttgagatggagtcttgctctgtcgcccaggctggagtgcagtggtgcaatctcggctcactgcaagctctgcctcccaggttcacgccattctcctgcctcagcctcccaagtagctgggactccaggcacccaccaccatgcctggctaatttttttctgtatttttagtagagatggggtttcaccatgttagccaggatggtcttgatctcctgacctcgtgatccgcccgcctcggcctcccaaagtgctgggattacaggcgtgagccaccacacccagcctcttccctcctatcatttttgtgttctggagacagtagcatacttggccctgggtttgacataaaactagttctacatatagaaagctagggacaaaaatgagttctggacaaaactaaaggactgaataatcatgtgaacagccaactctcctacatatgctaagcactgatgaagtgtttcatatattcactcacctaaatttcacaacaatcctatgaaatgctaactagcatgatccccagtttaaaggtgaggaaattgagtcacaggcagaataacttgctctgggtcaccaagctaataaatagatctgggttcaaacccaggcagcctggctccggaatcaactcttaaccacttagagcatcatcactgagatcgggagagggacaggctgctgtaaagagggtgaagcgaaaatgggaggagagcagcggttaagcaatgatgtgatggggctaaataaaaatggatacaaaaacgagtaaaagaccagagtaaaaggaaaagactggagaaggggcctaacattaaaagagaatgaggagaagggagagttgacaagcaaaggtgaaagcagaaagtcagttgtccatatggcttggggagataaagaaggcccaggaaggcctccaggaaaaggctgccatgtcaggcaggacacagaggacaattgaggaaaagtgattcttacaagatggtgaaggtgccattgtgggtgttgggctctggcacaggcacttggcggagcctctgctctgggttgagatcaatacatgacaacatctcatctccgcaggtacagagctcacatatgttggtgcttgtggaggccttgtgttcctctggtgcagttaaagccttattttgggtgtaactttcagactgcaccagtgaatcctgagcaggttctagttcagtaggtggacctgtgacttcagtcaggcttcgatgcagagtctgaacccggtctggacgaggagctgtagtcttctccagggctgtagaatgtccagtctctgtagtgggttctggaatgatggcaagtcccaggtctggaagctgagttgaggtctcctccgtggttggagatggtttaacctctgtagtaggttttgtagttatggtaagctccaggtccagaggttgaacggtggcttgagtcaggtgtgaatgctgagcctgacccttgtctgaaggtggaagtgtcacctcagggtgtcctggaggaggagctgtagtcatcagggctgtagaaggttcaacctctgtcatggattttggagtgatggtaaaccccaggtccaaaggttgaactgtggctcgagtcaggtgtgaatgctgagtctgaacctggtctggatgtggaagtgtcacctcaggatgctttggagaaactatagtcctcttcgggggtgtagaatgtccaacctccgtagtgggttctggagtgatggtaagtcccaggtccaaaagttgaactgtaacgctgggtgacactggatgctgagcttgatcctgacctggtgttggatttgttaccccttgatatactcgaagttggggtacaactttcttaggaggctgagttggggtctccttcatggttggagaaagttcaacctctgtcatggattctggagtgatggtaaaccccagatccaaaggttgaactgtggcttgagtcaggtgtgaatgctctggaggttgagctacaactacattagggaactctggagtctgagctggggcctcctgatgggttagggaagactcaccctcctcagcggtctgtggatgctcagctgcagcctcctgctgggttggagaggggttctcattattaataggttccggagattgaaatgaagtctcctgttgaactgctaaaggtccagcttcttctgatgactctggaagcagaggtgggcccccgtgctggatggcgggaggttctacatcattacctgaccctgagagccgagttgtagcctcctggtggactagagaagttcccacctctgcactaggctctgctgctatggtgagctgcacgtctggaggcttcacagagacactgggtgaagctaaatgatgagtttgatggtgacctggaggtgaaactgtgacttcatgatgttctggaggctgacctggggtctcctgctgggtcggagaagattcgacctccctagaagactcagaaggctgaactggctgctgctgctcactgatggaaagttcatgctccataggaggaactggaggctcaattggggcctcctgttgggttgcagaaggttccacctcctctggaaactgaattggggtctcctgctgggcttgggaagattctgtctcattggtaggctctgaagttatggtaacctccacatctgcaggtttaactgtaatgttgggcaagtgataataagcttgatcctcacctggaggttgaactgacacctcatgattcggtagagttagactctccatagaggactctggaggcagagctggggcctcctgctgcattgaagaaggttcttcctcaaggagctgtggaagctgtgctggggcttcttgctggagtgaagaggactggatgtcttcaagggtctctggattttgagtttcgggctctagatggaattgagaaggtccaacttgctcagagggccctggaggctcatctgacttcacccggagttctggaggcaggctaccgggatacggtgtatctgtactggaatattcattctgcaaagtctgtttctgactctgaggtgtggataattggtgtataattccaataatctcagcaaggctccaacgctgagctggatctttcttcagcttcttgggcgaaacagggagcctttcctgtggactcagcttgtcctttaaatcctgctgtgaagccaagaactgctctggctccaggggcagctctccagctgaatcccaggtgtccaggaatggaaccaaattttcagtcgattcctggggtggggctggcatctctgaggaagcagagggccccaggtgatcaaagtcccacgggtctgctgggagagtaggcgcatggggagattcccgtgggaaatgggaggagtgggaagaccagggctcaggcggccccagggggttagaggtcagctggagcgggtccttgacccactccagaggctgagcctccttgactagtagccacaatagttgccacataaggaggggccatgggccccagaaacgcagcggggacatgacacacgctagtgccgggcactgagcggaagtcattctggcagctccgagacgctcgtgccccttgtaagcatgagtcccgccctgtctttatgacacctttatttatgccacagatctgctccatgtcaccagggcactcttatgtcacaatcccgcccaagcacgccttcccatcctgccctgccggagcacccctctcctccccttagtgaggaaggatttgggcctcagatcctggtggtcccaggactccagcgcctgctgtggtggggtagggtggggtagggtgggatgggggcgcggcagagcttcccaaggaagtcaccggacctcgcctcaggatattcagaagtgctagttcagttctggcagccttcctcctttaaggtgaaatccgagaacactcttccttccagggagagcaactgacctgcaaaatgggcgccaggatgcacattacagtcatttattccaaagtgttgccattttcgctaaactgtcgcatgtttgataattaattcaccaccctattaggtaggggctgccagggaataagcgaggactccaaattttctgtaggaggggtgttgggagttggcaattcggtctgggagagaaggttttaatccgagtgaagagccctttgcactagcctgggaggaggctgaactgtcatcctgccttgactcaacacagccattcccctagaagttacagcacttctagggtcacctgtgttcagagatctaccctgtgtgcacacatggagaagaggcttaggttgttaaagtcagcatgttaaatcatttcctgaaatgcgactgtaactagaacccagctgacttcccccacagccgttcttacctattttattactgtctggcataattaccagcatgtaaactccaagaaggtgcttcatcttattttagtgcctggcatagacatagggtgcatagtgatggctttaaaattgaaggggggccgggtgtggtggctcacacccataatcccagaactttgggaggccgaggtggggggatcactgaggtcagaagttcgagaccagcctgaccaacatggtgaaactccgtctctactaaaaatacaaaattagccaggtgtggtggtgcatacctgcaatcccagctactcaggaggccaaagcaggagaatcgcttgaacctgggaggcagaggttgcagtgagccgagatcacaacattgcacttcagcctgggcaacaagagagaaactccatctcaaaaaaataaaataaaataaaatggaagagattccaagattcacctcatttagggatggagctattattataatcagatttctgaaatgagtgctgacttcctctcacatttcacaggaagctagacttcttaaagcttgaagtctccttggtgggttttatttaaattgaattaaaataattattttacagggaaaaatttcaaaacactttgcaactttggggtaaaagttaaataaaacactgtagccccaagttaagttcccactgaaatgatacttttgctcctttttttaaaaaaaattccataaatagtaaataatgactgttttgagattaatttagaaacaatccctatttaagagctttcatatgcagtcatgcattgcttgccacgtgaggagcttgagaaatgggtcactaggttatttcaccattgtgctaatatcatagcgtatacttacacaaacctaggtggtgtagccaccatacctagggtacacggtatggcttaggactcctaggctacaaacctgtactgtatgttactgtactgaatactaaaggcaactgtcacagaatggcaggtatttgtgtatgtaaacatggaaaatatatagttaaaatactgtgtaaaagataaaaatggggcctgggcacagtggctcatgcctgtaatcccagcactttgggacgccaaggtgggtggatcacttgagctcaggagttcaagaccagcctggccaacatgatgaaaccccatctctactaaaaatacaaaaattagctgagtgtggtgacgcgtgtctataatcccagctactcaggaggctgaggtaggagaatcacttgaacctgggaggtggaggttgcaatgagctgggatcataccactgcactccagcctggacaacagagtgagactccatctcaaaaaaaaaaaaaaaaaaaaagataaaaatggtatacctatatagggatagctccattatacgcttacggaaccaccatcatatatgtggtctactgttgacgcaaacttcattttgcagcacatgattgtaaatgattgacagaaagatcttcagcaaaatattccacccaagatacgtgggagatattgagatccaagcaataagccatatttgaaaggcattatagttttcaaaagctgtagcgcaatcattcttaaggccagttaccttctccccacatctctgggatcctgtttgaagggagttctaacaaggcctgtgttcgagcagcccagcatcccttactcctggagcggggggagactaacccctctcctgtgtccacaactgtagtaacacaatcctcggttctgctctccaaacttcaaataaggggtcagagccaagggtcaagactttaggaaaagccccggaaataccctgcactcaaaaagcagtttcagagtttcacattttcctgagaattaaacaaattatcctccaaattctgctgcttgttttgaattatggttatactggcaatgttatccaacccttgagttgtttttcttttctttttttttttttcctcgagagagtgtcttgctctgtcacccaggctggaatgcagtggcatgatctcggctcactgcaacctccgcctcctgggttcaagtggttttcatgcctcagtttcccaagtagctgggattacaggtgcccaccaccacacccagccaatttttgtatttttagtagagacagggtttcaccatattggccaggctggtcttgaactcctgacctcatgatccacccacctcggcctcccaaagtgctgggattacaggtgtgagccacagcgcctggcctgtttgttttttgagatagagtttcactcttgttgcccaggctggagtgcaatggtgtgatcttggcttaccggaacctccgcttcccgggtccaagcgattctcctgcctcagcctcccgagtagctgggattacaggcatgtgccaccatttctccatgttggtcagtctgatcttgaactcctgacctcaggtgatccacccgcctcagcctcccaaagcactggcattacaggtgtgagccactgtgcccggccctgttacctttgagtttttatctccacatacttatattaaaccgtgtagttcttcttcccatctgacatctacaatctcttcactgggtctgtactccatagctattttaccactttctgaaataaagttagcaaggatgaattcagaatctttttcattccaaaacttcctgcatataatggtagcaacccacaatgagacattcttttagtttctaaaagcaggaaataagcattttcctgaaagtttcctcatctcttcatcatacacttcgatttttgtttttcttttttcttttagacagggtctcactctgtcacccaggctggagtacagtggcactatcatagctcactgtagcctggaattcctgggctcaagtcatcctcctgcttcagcctccagagtagcaggcactatatcactgtgcccatctaattctcttttttagagacatggtcccgctttgttttccaggctggtctcgaactcctggcttgaagtgatccttctgtcttggcctcccgaaatgctgagatttcaagcgtgagtcatcatgtctggtctcacagctcagtttttaacatatgtatgaaatatcaactgtgtttggttcaaaggactttatgatcttacagataggaactaaggaataataacataagaaataaaaaatgtggaaataaaaacgttcaatcataatatgattaaaaggtaaggcaccaggtggggggtcgaagtaagttcaaatccaaaatagagaccactgggctagtagacacttcacattagaagcatggctaggtgtctactccctgagaaccaaaattccaccagatacaatgaacaaagctttagagagagaaaacatttgaacattttacgggcagaaaatggcccacatactctatagacaatacaatttccttcaaggcaaactagaactataaggcttttggtctaagaagtgagtgtgtgcaagggatacctttgcatactagggaggggtagacaacccacacatttagcttggttattaaatgtcattactcagacttgacagttgatgaccaaggaagtaagactttcactagaatggctgcccaggttggaaagctgagagcaatcagggccacctcttacaagcaaataaaggtctgtagtaacttaattacaatctcagtctctaagccttcagggttgtgaagcagaaaggcaactctgttcagggactcgttaaacaccaggtttcctttgggcacaggctatgacatttgtgccactgtagaactgaataggaaatacaagcagtgccattcaacagcatgaccacttccaaggctcacagcaaagcagctgattattgtataagaatcatatttggccaatatgtcagtgccagaaatgagagctggaactgaattctcgattcgagaaacataatctaataaattcttcagcagagtttatttattcagagagaaaacaatcacaacaatagcatattttgtctgcttaccttgtaagtatagttctgagtttttacacttgtcatctcattttttcttacaatatccgcaataaggttgattggattactaaccccagtttgcagataaagattgcagcttagagatattaaatatcttcaaatctctctggccataagacctaaaactgcatacaaaaatctaagagacagagttaggactcaaatccatgtgtccagggcttataatcactattctgtacgataggcatgcaattaaagaagacctgcctcaaacattttctgtgtgacctgaggcaagtccttttatagctataaactagggacaatatttgctgtcattttttctacaaatgtcacaaagaacaaatttgagcctgtcgctgtgaaagaacttagcaaatgaaagcatcctagggagtgttttagatatcgatatttttatccaattaacttttcaaaatgagtttatttgctcactgaaactgaagtacttcaacgacgattaagaaagttttacctagaaccacaatcaacagtttctggaatgcatctgacaaagccttctcaatagcaatctgggctatcttccctttcataggaatgacaacggtcttaaatccaacccaaactaatggatttaagatgcctatctgagtgatcattgctacatgttggttaaaaaataaaaatgcatccacgaatcttagctcataatcttcgtgattaaaggcagacagcacaagggtatggttgaacgtctctgttataggtacatcctggcagggcccatttttactgcctccatctagttgggaagttcctaaagtactagagggagacacaagccaagaacctggcacatatctcacatcacccagagatttaattcatcagttaaggctacactcctatggaccccaccctcctatgcatcaagggctggaatcactcactgaaaaaaagctttgttggctggacacggtggcccatgcctgtaatcccagcactttaggatgccaaggcgggttgaggccaggagttcaagaacagcctagccaacgtggtgaaaccccatctctcctaaaaatacaaaaattagccgagtgtggtggcacacacctgtaatcccagctacctgggagtctgaggcacaagaatagcttgaaccgggaggcggaggttgcagtgagccgagatcattccactgcactccagcctgggtgacagagtaagactattttcaaaaagaggccaggcacagtggctcatatctgtaatcccagtactttgagaggccaagatgggcagatcacttgaggtcaggagtttgagaccagcctgagcaacatgatgaaaccctgtctctactaaaaaattttttaaaaattaaaaattggctgagtgtggtggtgggcaggagggaggtgaactgcttgaacctgggaggtggaggttgcagtgagccgagatcacaccggtgcactccagcctgggcgacagagcaagactctgtctcaaaaaaacaaaaaaggtttggtacagataatctggctcctccctgggcatcatccatgaaagcctactcccctccattagcctacagccctgcctctgacttcaaaccctaagcctgagggccatgagtactagaaaaaaatctcaacgtcagttatcaattgagtaccctttctagtatctctagtagactcttgttccactgaagcccttctacgagtaaaaaaaaggctgaatgggccgggcgcagttgctcatgcctgtaatcctagcactttcagaggccaaggcagatggatcacgaggtcaggagtttgagaccggcctgaccaacacagtgaaaccccatctctactaaaaatacaaagattagccaggcatggtggtgcatgcctgtaatcccagctacccaggagtgtcaggcaggagaatcacttgaacctgggaggtggaggttgcagtgagccgagatcacaccactgcactccagcctgcgcgacagggcaagactctgcttcaaaaaaaaaaaaaagacaatgtttacacaaaactttctgtaaatctttacatgatgacttggcatggtgggtggctcatgcctataactccagcaccttgggatcctggggcaagaggatcacttgaggccaggagtttgagaccaggcaggacaacacagcaagaccccatctccagaaaaaataattagccacatgtggtggcgcacgcctgtagtcctggctagtcaggaggctaaggtgggaggatcccttgagcccagcagtttgaggttgcaatgagctatgagcatgctactgcactctagcctgggcaacagagcaagaccctgtctctaaaaaataataataaatagataaacaaatctttagataattttgttgggataactgaaggctataagagatacatatttgaaggactattttagacgagattgggcgcgttcagggtggtatggctgtagacttgaaggactattttaatacaaagcaagttcttaaccgaaaactggaaaaacattacttccttcttcctcctacgcttcttggcaggaagtacactgtacaattttaaatttaaaggttctggccgggtggggtggctcacacttgtaatcccagcactttgggaggccaaggcaggcagatcacgaggtcaggagatcgagaccatcctggccaacatggtgaaaccccatctctactaaaaatacaaaaattagctgggtgtggtggtgggcgcctgtaatcccagctactcaggaggctgaggcaggagaatgccttgaacccgggaggcggaggttgcagtgagccgagatcacgccactgcactccagcctggtgacagagcaagactctctctcaaaattagttaattaataaatcaatttattaaataaatttattaattaataaatcaatgtattaaataaatttattaattaataaatcaatgtattaaatcaatttattaaagcaatttatttacttatttaaaggctctgtcaggtattgcctaaggtaaaagtctgtattgtaagacagaaaacctctgcccaggacttcagtagctcagagagggaaaggcttgatatgtgtctgaaaagacaagttttagacagcaagaaaaaagagatccttcccatttcaactccttaccctcctctacccccaatgaaaacagaccttccttcgccttatccacaggctcctccaccaagccaaggccagactcctgcaatcataggatggcaacaccacctctaaagcacagaacttcagcctttgcttcggaagtggcaccatggtctcttcattttccctttcttcaaggtcagaaaactgaagctgttaggagttttagtgttaagttccttccgaggatgttaattaggcttcaaactgttttgttctgagaaataaaaactaaactccagtcattcaagctaacagttgaggtgttctatggcttcaaaatcaagtaagatttgtaaatgaattgctaggtgcaaccattacttattatatgccacacaaacagtggagaaaattatggacaccaccatccaagtgattgagattattaattttaggtagcaggccaattcagacatgtccacttatcctcaatggcagggggcctctcacatcccctccctgtaacccagttcaatacttctgtctaaagtctagaatttcaatgttgaaaggagagcgtggttagtgagagaaaatccacaaagtttatcctgatgatcctttctgaccatccattgaaaccaaagtagtaattcaccagttcttggcatcaggagctgtttcaggcaagggcctgatgtgcaactgccttatgtctgctgccaagaggaacctaaagtcacaagagacagacccacaaatatcacagcctgccagagattttattttggatacacctgagatttatcaataccaactgtgcaaagaaaagaaattgtttcagtcttcccattcagtagctccttcttgagaacatgacctgaagaatagataagatgaacccacccatcccccaccccaagttacccctgcttaaagaggaaatacacatacctctatacattttacaagcaactaaaacaactagaggttcatctgcatttataagcttctttgacaatgcaaatatctactgagtgttaattcttgaaatattttacacatttctgtgaatttcttacatcaccagttctttcttatgtctatttcattttgtaagtgtagaatatgattatattcatgaaactcaaatgatacaaatagtcaaatttattgtattagaaattaataagaatagtaaagttaattctttgttgatttgtttatgcaccttcctctgtcactggtttataagctccataagtgccagaggaaaacatatcttattcttttttcattcccagaacaaagcacagttcttggcatacaatacaggatagatgatctgttgattgagtgaatgaataaaacaatgagcaagtaaaaaatgaaattactttttcccactgaagagaaagagaaacgcttgttgggaaggagaaatgaagactattttttttttttttttgagacggagtctccctctgtcgcccaggctggagtgcagtggcacgatctcggctcactgcaagctccgcctcccgggttcacgccattctcctgcctcagcctccagagtagctgggactacaggtgcccccccaccactgccggctaattttttgtatttttagtagagatggggtttcaccgtgttagccaggatgatctccatctcctgacatcgggatccacccacctcagcctcccaaagtgctgggattacaggcgtgagccaccacgcctggcaatgaagactaatttttaaacgttgagtgctaccacggagaccagcctgtatcatgagtcacagtggagactttcggaacatctaggaaacttcagaagggctctaagcccctgggtggtacagacagttgtcaccttggataacgttgccacagttcttgctggcgaccatttcccttcatttcactgaaacaaaaacaaaaacaaaaaaccctcacagatgccttaggcctttccttgattttaaaacattattctcttttctgtatttataaaaaccaaaaaagacaggaactaggtgcatgtgctaaagtagaaaagaacacttaaggccaggagcagttgctcatgcctgtaatcccagcactttgggaggctgaggtgggcagactgcctgaggtcaggagttcgagaccagcctgaccaatatggtgaaaccctgtctctactaaaaatacaaaaactagcagggcgtggtggtgggtacctataatcccagctacttgggaggctgagacaggagaatctgggaggcggagattgcagtgagcagagaccgggccattgcactctagcctggggaacaagagtgaaactccacctcaaaaaaacaaaaaataaaaggacccttaaactagataacagtgggggtcaagcagtaacccaaggctctgagttcagtaagtaaataaatctaatatgaatgccctctcctctcactcatctattaacttgtagaacatttccttcattactgcatcagcgatgagctttatgctgtgaaattctcaaaatctaaagcttatgaagtggtctcaaggtccaaagcacactaaaaactcattacttacaaaatgataccaagtaactgtttcatcatctttaccgtacctttaccatatttgagtggctatgtgaaatggtcacaggttagaaacacatcatagtccaaaagttgaagaatattccacaggtaatcatttcagtcacaggaagtggaaccaggattgaagagggtgttgaataagctacaaaagtgggtatagtatacctggagtcattactaagcagagttctcagatttgatcaaggttaattcaatgagaaatggaatatatatagacaataggcaacaagattagcaggaagcagtcagatcaagtagccaatcaggaattgaaatcggtccttgaaaatggaaaggtgattgaattgaggcatacaatgagatatccttctgtggctctgggaaagtaaaattggttggcatattaacatggaataggatttctacaaggccgcttaaagaatgtttccatcctctgagaactgaagggagttccaaataggcagtttgtgactgatgatgagcatgttgatgataaagtctcctttatataacagccggcagacgacttggtcacacccacacatcttaaattcacataaaggtaaatatatggtcaggcgtggtggcccacacctgtagtctcagcacctttggggaggcgaaggcgggggtggatcatttgaggtcaggagttcaagaccagtctggccaacatggtgaaactccatctctactaaaatacaaaaattagccaggcatggtggtgcatgcctgtggtcccagctactcaggaggccgaggcaggagaatcacgtgaacccgggaggcggaggttgcagtgagccaagatcgcaccactgccctccagcctaggcaacagagactccgtctcaaaaacaagtcaatatagctgggcatggtggcttgtacctagctacttaagaggctgaggcaggaggattgcttgaggtcaggatttagagaccagcctgggcaacacagggatactctgcctctctaaaaatattttaagaagtaccaccaccatgcccagctaattttttttgtatttttaatagagacggggtctcaccatgttagccaggctggtctcaaactcctcacctcaggtgatccacccgcttcagcctcccaaagtgctgggattacaggcatgagccacagtgcccagcccagaacttgcatttctaacaattcccaggttgtgctgtttggggaaccatactttgagaaacacttccctataatctgataggttatttcccctaagatccagatgagtaaaaattaatacacattagatgaaattccagaagttatcttcgaactttgctactcattgaatgtcatgaagatattggaaaaaaaagaaaaaaaacaaaaaacaaccttgctactcaacgagggatttgctattatcacatttcagagaaattcagaacctcaggcctaaacccaggcctactaaatcaggatctgcagtttctcacaatcttcaggtgatttctatggtcattaaagtttgaaaagctgccttgaaacagtccttcctaaaactgaagtggaggtgccacaaaaatcatctggtaaattgtttaaagtaatcccaaatgcaactcaaatctacagaatcccaggtgaagctcagtaatctgtatttttatccttctccccaaataattctgatgtgcaggcaagtttgaaaaccactgctttaaagaaaatggatactccccttaccaagcagaaagtaggattttggaaactgatgcaagggaagcaaaaaagatgcctcaggaggcacgattacaacaggattgatgcaaacggaagctgaagcttaaccaaagacattaatgtacgcccacaaaagaaactgctaaggaagtcaagtggtctgcatgaattctgaagaaaaatggagaaccaaagaacaaaatttgtcaatgaatttccagcacagtctaggttaagggagtgaatttcttgactgaatggcacagactctgtaccacctgattggctgttaccttaatggaggaattatattacaatgtataggtactttaattagaatgacctggcagttactgaggcaaaattttccgctcctttgtattctgtaatacaagaaggatctacatggatgttctgttctctgaactgtctggatgaaccggtcaacggcactcatcataccttagtttttaaatctgcattgtggtcataatctgttatttaattaatttctcgtatttttaataaaaactttgcctatatattttagacagaaattgccttactttgctgaaatgctgagaaatcctagacagttttcaaggctgggctcaaatgtcacctctactaccctttgctgtgcctcctggcactgtgcttctgacactttgtacggtcctccatgacagcgtgagcacaattatattacaggcaattactcatgcccccctggctcatctgttgactcctttagagcacagatcatgttttatttattgtagcaactaaaacaattatttgttcaaccaatgacacccataaacaaaactacctgccgagggcagagatgcaggggtaaagtcatgccaagattgaaccccagaaaccactgtagatttttcagagttgactcctacgttttcagacttctagacttcaaaaaacaactctctataaaatgtatgtttctagaaggaagaagagtaacattgtcccccctttttttttttttttttttttttttgagctggagtcttgctctgtcgaccaggctggagtgcagtggtgcaatcttggctccctgcaacctccacctcccaggttcaagccactcgcctgcctcacttcaagtagctgggattacaggagcccaccaccacacccggctaatttttatatttttagtagagacggggtctcaccatgttggccaggctggtctcaaatacctgacctcaagtgatccacctgcctaggcctcccaaagtgctgggattacaggcgtgagccaccatgcctggcctatagagtgctttctatttgccagacattgtgctaagcactttaaaatgcattatttcattttatcctcagatcagctccataaaatagctaccattattacctctacatgtatatagatatatgtatctatatatacgtatatctacatacactgaaagtctcaccagtgttttaacttttgctttcaaccactatacatattttaaagagcttaagaggagaaacaaccgtttgcatttttaaattttcccagataccatttctgctgctctttatctctgaagttctagtattaccactggtataattttcctttggcctaaagaccttcttttacttttattttagagcagaacttccgccaacacattctcttagattttcttcatccaaaatgtctttcttctttttctttttgccttaattgttgaagggtatttttgctggatatagaattctggattgacatttctctcagtactttaacgatgttctgtagttacttgaatcgctgaaaggcttaaagttggggaccagctctatcacctatacattttatagaaaggttcattactttcatatcttcattgtggaccatagcctttatcatcacaaaattttgtctcatttatgagtttttaaattttgctttgaacctaaacttttacaactcctttctatttcctacaatgtggagtttatggcggacagcacaggcagttggaaatatatatctggagtttagaaaagaggtctaggtaggaaaatggatctagaagtcattgatattttggccgggcgcggtggctcatgcctgtaatcccagcactttgggaggttgaggcaggctgatcacaaggtcaagagattgaaaccatcctggccaacatggtgaaaccccgtctctactaaaaatacaaaaattagctgggtgtgttggcacacacctgtattcccagctactcgggaggctgagggaggagaatcacttggactcaggaggcagaggttgcactgagccaagatcgtgccactgcactccagcctggtgacagagtgagactctgtctcaaaaaagtcatcgatattttggtggtaattgagtcaactgataattaggggaaagttggggaaactaaatgctgaggactatcacatgtaagagggatgtttgaaggaggaataactggtcaaggaaatcaggtcataagtggcaacaggaaatttaagaaggatgtagtagccaaaggtatcatacatgcattgtatatgtatgtagatatatatctttcaatgtatgtagatatacatctacatacatacacaatgtatgcatgtagatataatatacactgaaagtatagatacatatctacatacattgaaagtgtatatatatacacacatacacacacacatatatacaattataagggggggctagaataaagaaacctatatgtttgcaatacttttacattttatttagaggtaaaatgctaactctaagtaggtaggttaggtatatattttgtaattcctacagcaaaaacatagcacagatataaccaaaagccaattaataaaacataacactaaaaaatattcagttaatccaaaaataggcagaaaaaagaaacagaagaaaccccccaaaaaaagaaataaccagaaaacaaataataaaaaggaaacctaaatccaatcatcatcaatcatattaaatgtaaatggtccaaaacacattaattaaaagacgctgtcagattacatttaaaagaaaaacgaaaaaacaagaaaccatttgaaaatataatgatatggccaagtatggtggctcacgcctataatcccagcgttttgggaggttgaggtgggcaggtggcttgagcccaggaattcaagaccagcctgggcaacatggcaaaaccccatctctatttttacaaattaaaaaataaatgaatatcatgatatctagattaaaagcaaaagggtagagaaagatatgtcattttaacactagtcaaaaacagtattatactactaatataaaacactaattttatattaatattaagtaattttttttttttttcccccgagatggagtcttgctctgttacccaggctagagtgcaatggcatgatcttggcttactgcaacctctgcctcccggcttcaagcaattctctggcctcagcctcccaagtacttgggattacaggcagctgccaccgtgcctggctaatttttgtatttttagtagagacggggtttcaccatcttagccaggctggtctcgaactcccgacctcaggtgattcacctgcctcggccttccaaagtgctgggtttacaggcatgagccactgcacctggcctattttgggttttttttttttttttcttttgaaatggagtcttgctctgcttcccaggctggggtgcagtggcgtgatctcggctcactgcaatatccaactcccggattcaagtgattatcttgcctcaaccttctgagtagctgggactacagacgtgtgccaccacactaggctatttttctctttttagtagagatggggtttcgccatgttgtccggtctggactcgaactcctgacctcaggtgatccacccgcctcggcctcccaaagtgctgggattacaggcatgagccaccatgtctggccaaataatggtttttaatataatgattattaccagaaataaaggttatttcagaatgataaaggggtcaaataatcaagaggacaaaactgtaaatgtttctgcatctaataacagtgcctcaaaatacaggaagcataaacagacagaattttaaggagaaagagaacaaacccataacaatcattgcagacttcaacactcctttctcagtaatcactagaacaagcagacaggaaatcagcaaggatagggaagaccttaacacgatcaaccaacttgacctaattattatttatgaaacactttacctaaaggcagcagaacacatctttcctattacaaactgaacattgacctaaacaaacaatgtttcaggccatatacaaacctctacatttttttttaattcatcataacgagtatgttccctaaccataatggaattaaattagaaaccaacaacaaagatgtctgggaaatccctaaatgtttgaaaattaaacaatacgttttaaaacaaatcatgggtcaaagagtaagtcatagtagaaattttacaatattgtgaaccaaatgaaaatgaaaataaaacatgtatcacaaattctaagatatgtttttaaaagtgcacaaaggggctgggcgcagtggctcatgcctgtagtcccatcactttgggaggccaaggcagatgaatcacccgaggtcaggagttcgagaccagcctggccaacatggtgaaacctcatctctactaaaaatacaaaaattagctgggcgtggtggtgggtgcctgtaatcccagctacttgggaggctgaggcacgagaataatttcaacctgggaggtggaggcttcagtgagccaagatcgcaccactgcactccagcctgggcaacagagcaagattttgtctttaaaaacaaaaacaaaaacaaaaaaacgcataaaggagcacagtggtttagcctggaatcccagcactttgggaggccaaggcaggaggattgcttgagcaaaaaaattcaagaccagcctgggcagtatagtgagaactcatctctatttaaaaagaaagaaagaaaaatcaaagaaaatgaggtatacatgcacaagaggatattattcagccatttaaaaagtgaagtcatctataaagcttaaggtttggaaaataaaatctgtttgcagcaacatggatagaactggaggacattatgttaagtgaaataggccaagggcagaaagacaagtatcacatattctcattcatatatgagagattaagaagttgatttcatggagataggcagtagaatgatggttaccgggggctgggaagcaggtagggatgaagacaagttgattcatgggcataaaaactcagtcagatagaaggaatacgttttagtttttatttgcacagtagggtgactagagtcaacaataacttagtgtatattttaaaatagctagaacatttgttatcttcccaatacaaaaaaaaggataaacatctgagatgatggataccctaattaacctgatttgatcattacacactgtatgaatctatcaaaatattgcatgtacccttataaatatgtacactctaccttaaggaaacagtgaaaaaaggtgtggaacaacgaccacaacaaaatcaaagaggaaaatctttgtgaacttgggtttgtcaggccaggaatcagcaaaccatggccaatccactacctgtttttctaataatcaaaacaatataattgataatttgtaaattatgtgaaattcaaactgcagtgttcataaagttttattggaacagctattatcattcatttacatattgtctatgactgctttcattgctacaatggcagagctgcaacagggacagcaaggctgaaatatttactatctgaccttttacagaaaaagtctggcaaggtctgggttaggtagagctgttagatgaacaccaaatgtgtaaaagaaaaaatgtggtaaatcagacttcatcaaaatttaaaacttatgctctgggaaagagacaccgctaagacaatgaaacacaaggcacagatggggagaaaatgtatgaacatcacacagcctaacaaagcacttatatccaaaatatataaagaattcttactacccaacagtaagaaattggccaggcatggtggctcatgcctgtaatcccagcactttgggaggccaaggtaggcagattgcttgagctcaggagttcaagaccagcctgggcaacatagcgaaaccccatctctattaaaaatacaaaaattagccacacatggtggcatgcatctgtggtcctaactacttcagaggctgaggtggtgggaggatcaccttgaacctggggtcgaggggaatgacaggctgcagtgagccaagatcatgccactgcactccagcgtgggtgaaagaacgagactctgtctaaaaaaataaaagaagcctggcgtggtggctcacgcctgtaatcccagcactctgggaggccgaggcaggaggatcacaaggtcaggagatcaagaccatcctggctaacatggtgaaaccccgtctctactaaaaatacaaaaaattagctgggcgtggtggcgggtgcctgtagtcccagctacttgggaggctgaggcaggagaatggtgtgaacccgggagggggagcttgcagtgagtcaagatcgcgccactgcactccagcctggcgacacagcgagactccgtctcaaataaataaataaataaaataaaataaaagaagaataacaataaagaaagcaacccaattaaacatcttaaataaagattttggtatcttggccaggcatggtggctcatgcctgtaatctcagcactttgggaggccgaggcaggcagatcgcttgagcccaggattcgaaatcagtctgggcaacatatcaaaaccccatctctattaaaaaaaaaaaaaaaaaaaaactagccaggtgtggtggtgcgcacttgcaatcccagttacttgggaggccaagaggtgggaggatggcttgaacccagaaggtggcggctgcagtgagtggtgactgtgccactgctctccagcctgggcaacagagcaagactctgtctcaaaaaaaaaaaaaagactttagtatttttccataaacaatgatatacagatggcaaatcaaaagatgcacataaaaagaggctcagaaccattagtcattagggacaaggaaattaaaaccagaagaagctaccaccatatacttattaaggtggccaaaaaaaaaaaaaaaacttgaggccgggcgcagtggctcacgtctgtaatcccagcactttgggaggccgaggcgggcagatcacgaggtcaggatatcgagaccatcctcgctaacatggtgaaaccccgtctctactaaatatacacaaaaattagccgggcgtggtggtaggcccctgtagtcccagctacacgggaggctgaggcaggagaatggcatgaacccgggaggcggagcttgcagtgagccgagatcgcgccactgcactccagcctgggtaacagagccagactccatctcaaaaaaaaaaaaaaaaaaaaaaaaacctgaaaatatcaagtgctagggaggatacagagcaaccggaactcttcatacatttgcaggtaagaatgcaaaatggtacagctactttggaaaacagttttggcagtttcttataaacatacaacccagaaatcatactcctaggtatttactcaagagaaacaagaattgtgttcagacaaaaaacattatggaaatgtttacggcagctttattcataggtgccacaaactagaaataattgaaatattcaactattgaacagataaatgcactgtgatacactcatataaaggactgctactcagcaataaagaaactactgatacaacaacacagatgaatcttaaatacattatgcactgtacacgtataaactaaaaaattaaaatacctatttaaaagtcaaacaggccgggcgcgatggctcacacctgtaatcccggcactatgggaggccgaggccggcggattacctgaggtcaggagttcaagaccagcctggccaacatggtgaaaccctgtctctactgaaaataccaaaaattcgccaggcgtagtggcgggcgcctgtaatcccagccactcaggaggctgagacaggagaatcgcttgaacctgggaagcggaggttgtggtgagctgagatcgcgccactgcactccaccctgggcaacaagagcgaaactctgtctcaaaactaaataaataaagtcaaacagtacatgaaaaaataatatgatcaagagaggttcactgcaagaatgtaagggtgaatcaatataagatctactaatataattctatgaatatacactactgtaattaatatgtagcatgcaggaggaaaactatatgatcatcttaaaagatgctaagatgtcatttaacaaaatataatagccatatctgatttaaaaaaaaaaaacttaaacagaaaaaaaattgaaataggtgaatatactcaacacattaaaggtctcaaaccaacagttaaccattaaatatctgcaacagttccattaaattgggatagcatactaagatgcctatcattataactaacatttgacattgttttggaggaggtggtagggaatgcaatttttttcttttttctttattacccaggttcccatcaatggtaaaggcaatgtaatttgaagagaaaaaggagacataaatataagaaaatcagatgtgtacatgattcatgtttgcagatgacaaaactttattcctagaataaagttattccaatcaaagcaaaagctacaagaaacaattagaaaaaagaataggtggctgaattcaaaattaattttttaaattaatgagttttcaactagaagccccctagcagagcaggtattttcatagacaaattaaagattaaataagatatcatggcataagtgaaaatatttaacaaataaattatacttcatccaattttgtaaaaaatacatacatatacctgtgccaggtgcagtggctcacgcctataatcccaacactttgggaagctgaggcgggcggatcgcctgagctcaggagttcgacaccagcctgggcaacacggtgaaactccatctctactaaaaaatacaaaaaattagctgggtgtggcagcgagcacctgtagtgactacaccactttgttgacggccgtccggacctgcagctgtccgggccaggtggctgcccccgcctccccccggccggggcgctggtgctggggtggggctggcggcggcggcggctttctccggctactgctgccccccctgggcgagctcagccgcgtcttgggcgccacctcagcctgggcggcggcccacctgccccggctgctgccgcggtgccgcgagcggaaccccggatgggtccggacgtgggcggcggcggcggcggcggggccggggcgcagcgctccgcagagggagccgcgggctgcttggtcggcctgccccgccggcccctcatgttggaaccgaggcggagggagaagggaaagcggccgggaaggggcgggcgcaatgggcgcagtgggggcggccggggccgggtggggaggccagaggggcagggcaggaggggcccggcctgcggaagcggttggagggagaaggctcaatccgaatggctggggcctcactgcggatcgccttcagccgccatcttgtttcttccgttaccggagcgcggtcacgtgagctgagcagcctacgagcctgggacggggcgaggtggcgcggcggccgctagggggagcgcgggagcattgagtcgggggcggagagcctggggcgccggggctgggcgcagcgcggcgcggctggactccgggcgcggtggcgccgttgagagagacgcgcagctcgcgaaatgccccgcggctaaggccttcggagaccatagtctccgcggacccctggctggagcccaaagccggccggacctcctccctgcgtctccccttccgcggctcggagaggaaggcaggagagcccccaaatattcccctcccgccccctagggaaactgaagctgaaagagccagcgaaagaaaaaaaaagtctcggagtggggcggcccgagcgacctaagggacggggcagcgccagcgaccgagggaaattagtcggggtgggggaacagggagacaagcccccagaatttaggaaactcctaaattctactaaaaatacaaaaattacctgggcatggtggcgggtgcctgtaatcctagctactgaggaggctgaggcagaagaatcgcttgaacccctgaggtggaggttgcagtgagccaagattgcgccattgtactccagcctgggctgcaagagtgagactccttctcaaaaaataaaataaaataaatcaagaaaagtctggaaaccatgccaactggtgaaatgaataaagaaataaatgttgtctggactgagtggctcacacctctaatcccagtactttggaggccgaggcgggcagatcacttgaggccaggagttcaaaccagtctgggcaacatggtgaaaccctgtcttttctacaattgcaaacaaattagccggacgtggtggtgcatgcctgtaatcccagctactcgggatgctgaggcccgagaatcgcttgaacctgggaggcagaggttgcaatgaactaagataacgccactgcactccagcctgggtgacagaatgagactaggtctcaaaaaaaaaattataattcagtaacatagtcagttacaagataaacattgagcctgcctcctaggttcaagcgattctcatgactcagcctcccgagttgctgagattacaggcgtgtgccaccatgcctggataattttttgtacttttagtgcagacggtgtttcaccatgttggtcaggctggcctccaactcctgacctcaagtaatccacccacctcagtcttccaaagtgctgggattacaagcgtgagccactgtgcccggcctcaatttgggtttttatggaagcttcattacagagtcattaatgattacaccgttggccgttggtggtcagcttaaccttcagcctctctctctttctcagaggttgagagtggcactgaaagccctgaccaccagccccaatcctgaggctgtctaggaaagcctaatcagtcaatcattagcataaaaaaaagacttattttgcagattctgagggttttaggaattgtatgccaggaaccaggaagatcaaatacgtgtttcacagtctcacaggaccacatagaggagattggtcatcagtgtttctcaacagaagcgctttggccttttggacaagccagtttacacactgtaggaagaagtttagcatctctgggcccggataccaaaggctagtaccagcctcatcatttttacaaccaaaaaggtaaccttgcccgctccccatacattcccactaggaggtgtcagaaccacttccggctgagaaccactggaatacattttggaatatccaaaaaatgtacttccattttaagaaaataatgtgggattggtgtttttcattttttaattatttggaggaaattgccaatgacaagtgcttgaacaaaaaatccaaattacagactagtgtatatatagtgtgatgtatccattcaattcactcaggaaatgtttatttaacacttaaggtgtgccatgcactgtttccattccacattctgtacagagtgggaaaatatttgtagtttatatcctttatatgtaaataaataggtcagttgcacttcaaagccaacaaataaaagtgatctctaaatctaaaccccaaagacaatcatttttaaacaactttagaatatatcttgtatatattgttttaatgcatgtgttcatatataaacacattttatacaaaaacaatctaatgaggaagaaaaattatactttgggaaagaaggagccgggtgcaatggttcacgtctgtaatcccagcactttgggaggccaagggaggtgaatcacatggcgccaggagttcaagaccagcctggctgacatagtgaaaccccatctctacaaaaatacaaacattagctgggcgtggtggcgcacacctgtagtcctggctactccggagactcaggcaagagaatcgcttgaacctaaaaggcagaggttgcagtgaggcgagatcgcgccaccacattccagcctgggcgacagagtgagactctgtctcaaaaacaaaaacacattattgctaaggtaatttgcttttgagttcaagaccagcctgaccaacatgaggaaactccgtctctgctaaagtttcaaatatgtataagtactggcatattttaaaaatacattttattttctttttagtttataagatatgtgattccttctttacatctacctatttttatttctgcctctttttttaaatagggttaattttttttttttaaatggagtcttgctctgttgcccaggctggagggcgtagggctgcctctgctcactgcaatctccgcttcccgggttggagcaattctcctgcctcagcctcctgagtatctggcattacaggcacctgccaccatgcccagctttttttgtatttttagtagagacggggtttcaccatgttagccaagctggtcttgaactcctgacctcaagtgatcctccctcctcagccgctcaaagtgctgggattacaggtgtgagccaccatgcccggcctgtcaaattgctctataatttcatttggagtgaattcagattagaccattgattttattggcttttttttttttttgctttttgagaagcagggccttattctttttcctaggctgcagtgcagtggtgcaatcacaccccatcgcagcctccccctacccagatcagtaagtccttccgcctcaggctcccaagtagctgggactacaggcgcgtgccctgccaccatctctggctaattttggggtgttttttgttgttattgttgttgtcattgtttttttgtagagacaaggttttgccatgttgcccaggctggtctcaaactcctgggctcaagcaagtgatcttccttccttgacttcccaaagtgctgggattataggcatgagccaccgtatgggccctggttatctttttttcatattacacattttcattttcaaacatttgaattttgcaagcttattttgagtgagaggagtgttgttttcttctctcctgaagcccagtgtagcccagtcaacccttaacttccagcagggagccagcgcttatcactgcctcacacacagcatgttagcctcccttatccccgagaaactcatactgttagtgttcagccaccacttcctccttctgcatctggagtctagaaggcctgcagttttagtcctgctcacagttttgtgtctgttccgttgagattgttgtaacttatttaagcatgactatgtcttttcaatttctcttttttatattttactctcacttgtatgttcttgaagggagagggaggatcaaagtgtgcgcccgctataccatcttggttttcccaaaatctgtcccacgatgttataaaaatatatgaactaggaaatgaaactcaaggttttctttctaaccaaggaagaagttcagtctctctctataaatagagaagggctgttgaataatttgtcacattgcttctcttttgactttataagactagatagtctatagacagagaaacagtttcattaaaccagggccattcaggtttatttggtaaaatatttgtgatatatttaaaagcttcctgaggtactcatgtaatgattgttactagtataattggtgcatagggctgggtgaccctgcaaaaaaagaggcacagcaaactttatttcaggtacagatggaccttacctttaggcaaatccttgaaattttggcgtggggaatcaggtttttctgtgggttttttgtttgtttttggcttttcatagacagctatatgaagtctctgctttagaatctataaaactatagcttcagaggctgggcgaaatggctcatgcctataatcccagcactttgggaggctgaggtgaaaggatcacttgaggtcaggagatcgagaccagcctggctaacagggcgaaaccccgtctgtactaaaaatgcaaaaattagccaggcatggtggcaggcacctgtaatcccagctgcttgggaggctgagggaggagaatcacttgaacccagaaggcggaggttgcagtgagccgagatcatgccactgcacgacagagcgagactccatgtcgaaacaaaaaactgtagcttcagagattcacttaaattatcatttataggccaagagagttgtggctcacagcctgtaatcccagcattctaaaaggctgaggtgggtggatcacttgaggccaggattttgagaccagcctgggcaacatggcaaaaccctgtttctacaaaaaggaatttgctgggtgttgtgatgcacacctgtagtctcagctacttggcgaggctgaggccaggggactgcttgaccccaggaggtcgaccctgcagtgagccatgatagcaccactgtactctagccggggcgatcaagtgaggccctatctccaaaaaaaagttttgttttgttttgttttaacagggtctcactttgtcatctacattggagcacagtggtgccatcacagctcactgaagtcttcacctctcaggcttaagggagcctccaacctcagccttccaagtagttggcactacaggcatgcgtcaccacacctggctcatttttgtattttttagtagagatggggtttcaccatgtgtccaggctggtcttgagctcctggacgcaagtgatcttccgccctcggcctcccaaactgctgggattacaggtgtgagccactgtgctggacgaatttttttaaagaaggaaaaataaaattaattcggcccttcattaaaaaaattaaaaactctttaaaggaaacgtgggctaagttatttttctgagagactataagatttgggaagaaaaataatcatgatgaaacgttttgggaatatttttggtatttaaaattattgtagaaatttataaatgtgtcagattttggctgggcacagtggctcacacttgtaatccaagcactttgggaggccaaggtgggcagaccacctgaggtcgggagttcgagaccagcctagccaacatggtgaaaccctatctctaaaagaatttttaaaaaaattttaagtcagattttaagaaatattcttatggctgggtacaggtggctcataactgtcatcccagcactttgggaggcaaaggcaggcggatcacttgagctcaggaggtaagttacctgggcaacacagcaagactccatctctacaaaaaaaaaaagtagctgggcatggtggtgagcacctgtagctacttgaggggttaagtcaggaggatcacttgagcctggcaggtcaaggctatagcaagccgtgtttatgtcactgcagtccaggcagggtgacaaagtgaaactcttatctccaaatgagaaagaaatcctcttggtcgtagatatgatttctttacaccaagtttgttcgtggatgccaatcacaatgggtttgtccctagggtaatatagtttgctttgatcatttccaagagtaagttgtactacaggatagcagaagagatgcacttaaaaagtatggcaaaatgcatattgagacaatagtatgttggccagacacagagactcacgcttgtaatcccagcactttgggaggctgaggtgggtcacctgaggtcaggagttcaaggccagcctggcaaacatggtgaaaccctgtctctaacaaaaatacaaaaaattagctgagcttggtggcacgtgcctgtggtcctagttacttgggaggctgaggtgggaggatcacttgagcctgggaggtgcagggtacactgagccgagattgtgccactacactctaacctgggtgacagagtgagacccagtcttaaaaaaaaaaagaaaaaacaagatgcagtaaagaagccgaccaaaaccaagatggtgacgaaagtgacctctggtcgtcctcactgctcgttaaaactttttttttaaaaatatgaaaagaggctgggccctgtggctcacacctgtaatctcaggactttgggaggcaaaggcaggtggattgcctgaagtcaggagtttgagaccagcctggccaacgtggcacaaccaaaaatgcaaaaattagccagatgtggtggcacacacctgtaatcccagctacttgggaagctgaggcaagagaattgcttgaagccaggagacagaggttgcagtgagccgagatcatgccactgtactccagcctgggtgatagagcaaggctctgtcaaaaaaaaaaaaaaaaaaaaaaaaaaagcctggcctggtggtgcacgtctgtagtcccagctactcgggaggctgaggtgggaggatcatgtgagcctgggaggtccaggctgcagggggccgtgatcctgcccctgccctgcagcctgggttatacagcgagacaaaagaaaaaagaaaaaagttagtggtaacaggataaactacataaccgtatattattccttcacattcatgaagcaggtcaatttgaagcttgaggacgacttccattcctctaggtgaatctaccaagaaatgccttggtagagctaggagtgccaatggtatcagcaaggccagcctggttccctgtgattcatggtaattctcactatgactttgacatgatgttcctacactgtgcctatcaacacttgtagacacactgtataagcgtttgttacatttactttttcttttgtcattaggtcttttattacagaggccactgtgcactccacaatcacacacttacacagctccgccttgccaggcagtgtagaccctgccaagcagtgtagacagattctggataactatctttgcatccttccccataccatgtcccagatgttgaactgaagcagctccttccatgttccctacccgttaattagccaggccgctgcccacattgtcacaaacattatattaactgaaaaactggcccatgccatattccattatgagaaattattttaaattcgattaaattccaatgtttattcagaaaacctggtagagattgaattgctctatgtacctttcttagttttcttcttcatagcatattttgaccatttatcttctacacctggctgacctgcatggtccttgtagtgtaacttctacttggtgtttgcgctttgctttgttttcaaatttaaattgtgagatacatttttaaacctatctaagaaatagccctgatattgaaatggcttctgtggaataggtttgacagatgtaagtctttgattctttggctttggtttttgtgcttgttacagttttacacacattcattcagaggaagacattaccatcaatgtgttgtttcttttttcaaattccagtatgtttttaaagacccatatttcactaagcagtgtacttgttgaaactgatgtgagtgactttatgtttccacatgtgatagagcatcagatactggagtttgccaggggtagaatggttggattcaggaatgtttagctgactcatagcaggaagttacactgtaaaaaaatgaagcaaggcagggaagacagatttaagtaccatgcagctcaaaacgacaactacattgtcattttcattgtgaatacttttaggttctatattggctgtgatctttgtactaactggtattatggagaatgtgttggcatcgcagaaaaggaggctaagaaaatggatgtgtacatctgtaatgattgtaaacaggcacaagagggcagcagtgaggaattgtactgtatctgcagaacaccttatgatgagtcacagtgagttctgataagagcatcacatttaataatttaggaagccaaattgctctgactggttacttatttactttaaaataaaaagcagattttttctacatttgttatacacttacgttacaaattccttttcattttttttttctctttttccctttttacctacccttcaaaatttatcttgcttcatagtgaatgtttgagacacattggggaaaatgtggtttaatggtagatttgattcttcaatatgtaacatagaaattaatgagattaaaatagcctgacttgtttggactttatcagtgtttgaaatggtgctttattgcaggttagaaaaacactaatttgggtataagctttgagactctgttattaccttacaggattttgaactcccatatggtacagtactagttgaaagatttgtgacttgttttcagctttaaaatcaattgaatgtttcatatttatctttaaattggttctccaaaattacagtgttcttataaatttttttactgcttgttcttaacatcaaaaatactaaattaatgtactggaatgtcgatcttgaaagtattaaaaccataatactaaaactattttatatcccagggtttagcaaattttcaggtgcatgctttattataagtaacatcatcccatctgttttgaactcacatttccatttcagatcttgcagattttttattggccgtgatcggtgtcagaattggtaccatgggtgctgcattggcatcttgcaaagtgaggcagagctcattgatgagtatgtctgtccacagtgccagtcaacagaggatgccatgacagtgctcacaccactaacagagaaggatgatgaggagttgaagagggtgctccgttccttacagatgagagcccctctgtgtgcagcatttgaaaatgaaatcagccggcataattttggaagcatttctaggatttcaagtttccaatgttaggatttcaagtttccaatcttagagtgattatttactgactctcagctagtctagtgaagggcttgacaaacttcagtccttcacataccagtgtcatgagctttatcatatccccacaccacctcagcttatctaacactcagataatctaacgtgactcacttctttatacattttatttttaaagaaacttcctctcactcccatggattgagaaacagtatgattagattatagttattattttccttatgaaagacagaaagggggctgggtacgggggctcacacctgtaatcccagcactttggggggctgaggtgggcaaatcatgaggtcaggagtttgagaccagactggccaacatggtgaaaccccatctctactaaaaatacaaaaaactagccgggtgtggtggcgtgagcctgtaatcccagctactagggaggctgaggcaggagaatcgcttgaacacaggaagcagaggttgcagtgagccaagatagagccatggcactccagctcgggtgacagtgcgagactctgtctcaaaaaaaaaaaaaggaaagaaaagaaaaacaggataggtatggtttgcaggattagcaagtgatacagatgtattgaagacatagaaggccagtgtggttgctcacccctataatcccagcactttgggaggccaaggcaggaggatcacttgagtcacttagttagagaccaatctgggcaacaaagtgagaccccatctctacaaaaaataaaaataaaaaattagctgggcatgttggcacgcacttgtttatccagctactcgggaggctgaggtgagaggatcacttgagcacaggaggctacagtgagctatgatcgtgccactccactccagcctggatgacagagcgagaccctgtctcaaaacaatggggggaaataaaaggatatagtgcattggattgaaactttctcctatttttatcataatcacaagaattgaagaaactaaaaagggaatcgtagtctcaatgtgtggttgaatgttatctaacatcacatctctgccacctcatcattaatcagctgtggtaatgattccacactttgaacccatcccacctgtttacagaagcagttgcaatgccagcatcactcagtgacagctcaccatgtagggcccagaatactgcttttgtgacttctaaacttgtgttccaccccccacactgtggggaaaagaaagagagatcagattgttactgtgtctgtgtagaaagaagtagacataggagactccattttgttctgtactaagaaaaattcttctgccttgagatgctgttaatttataaccttacccccaaccccgtgctctctgagacatgtgctgtgtcaactcagggttaaatgaattaagggctgtgcaagatgtgctttgttaaacagatgcttgaaggcagcatgctccttaagagtcatcaccactccctaatctcaagtgcccagggacacaaccactgtggaaggccgcagggacctctgcctaggaaagccaggtattgtccaaggtttctccccatgtgatagtctgaaatatggcctcatgggaagggaaagacctgaccgtcccccagcccgacacccttaaagggtctgtgctgaggaggattagtataagaggaaggaatgcctctttgcagttgagacaagaggaaggcatctgtctcctgcccggccctgggcaatggaatgtctcggtaaaaaacccaattgtctgttccatctactgagatagggaaaaaccgccttaaggctggaggtgggacatgcgggcagcaatactgctttgtaaggcattgagatgtttatgtgtatgtgtatctaaagcacagcacttaattctttatcttttctatgatgcagagacctttgttcacgtgtttatctgctgaccttctctccactattatcccatgaccctgccacatccccctctccgagaaacacccaagaatgatcaataaatacaaagggaactcagaggccggcagcatcctccatatgctgaatgcaggtaccctgggcccccttatttctttctctatactttgtgtctttttcttttccaagtctctcgttccacttaacgagaaacacccacaggtgtggaggggcaacccaccccttcaccacaccaaggtcttccgaccaggctttgagtaccattattgcaaaggaagctcatcttaggtaacttattactagagcagaaatcacctaatgtaaagtatttcatgtatcgcatttaaaactgacttttgggttcattgatgtagtgactcaactgggaatcttaaatggaattagtgttttcactgacaataagaatgcctactttttcattataggcccataagatgtcccggcctttccttgaaccagtagaccctaatgatgcaccagattattatggtgttattaaggaacctatgggtaagtacatgagttgaatatgaagttttttcagaagtctcagtggatattttattaaccacaaaattaatatcttagaatacttttagcaaggctggtgggggtataaattggtatggtcactttggagggtaaattgatagtatctattacagttgaattgtgcatactcggttattttattttatttttttgagatggagtctcaccctgttgccaggctggagtgcagtggtgtgatctcacctcaatacaacctctgcctcccaggttcaagcgattctcctgcctcagcctcccgcgtagttgggactacaggcacgtgccatcacacccgactaatttttgtagttttagtagagacgaggtttcactatgttggccaggatggtctcaaactcctgacctcaggtgatccgctcgcttcggcctcccaaaatgctgggataacaggcatgagccaccgcgctcagcccccccagtgatcttcctttgaggaaaagccacggggtgctttctctcttctgtagcaaggaagatggtttctaagagggtattttaaaggcagtttacctaaaataaaagtgaaaggccaggcaaggtgacttatgcctgtaatcccagtactttgggaagccgagtggggagaatagcttgaagccaggagttcaagaccagcctgggccacaatatgagaccttgtctctactaccaaaaaaaaaaaaattaaccaggcttggtgatgagtgcctatagtcccagctacttgggaggctgaggcaggagaatcacttgagtacaggagtttgaggctgcagtgaactatgatcgagccactccaccccagcctgggtgacacagcaagaacttgcctgtttaaaaaaaaaaaaaaactgaggccaggtgcagtggatcacgcctgtactcccagcactttgggaggccaagtggggcggagcacgaagtcaggagatcgagaccgtcgtggctaacacggtgaaaccccgtctctactaaaaataacaaaaaattaggcgggcgtggtggcagacgactgtagtcccagctactcgggaggctgaggcaggagaatggcatgaacccaggagacagagcttgcagtgagccgagattgcgccactgcactccagcctgggagacagagcgagactccgtctcaaaaaaaaaaacaaaaacaaaaaaactgaaggataagcccagctaaagtatccaatttttattctcagcaaaggaattaaaaaataaatgaatatatatataggcaaggaagcaagaaaagtaggcagcaggttatagaccaaaaacaagaaactacaaaatctgtaaaactaggctaggcgtgatggctcatgcctgtaatcccagcactttgggaggccgaggcaggtggatcacctgaggtcaggagtttgagaccagcctggccaacatggcaaaaccccatctctactaaaaatacaaaaattagccaggtgtggtgatgcacacctgtaatcccagctactcaggtggctgaggcacgagaattgcttgaactcaggaggcagaggttgcagtgtgccaagatcacaccactgcactccagcctgggtgacagtgagactctcacaaaagaagaaaaaaaaattcccaaccttaccaacataacaagaccatgtctctacaaaaattttaaaaattaaccaggcatagtggcgtgcacccatagtcctagctactcaggaggctatgacaggaagatcacttgtgcccagaagttcaaggctgcagtgagctgtgatcacttgtgcccaggagttcaaggctgcagtgagctgtgattacaccaccgctctccagcctgaatgacagattgagaccctgtctcaaaaaaaaaagacaagaataaaagaaaaattttctgagctgatgcgagtcacaggactttaaattctagcagaataaattcattcactcagcaaatgactattgagaacctgatgtgtgccagatacagggaatttagcagtgaataaattaaagcccctgcactctatgaggggtggggggagcaaggggtcagttgataaacattataaaccaggtggacaaatggaaaaagactcacccctacatacatcgctataaaatttccaaacattaagaataaaagaaacttttagataaaacagacaatctataaaacaagaattagattggtgtcagatttttctgctacaacatttagtgctagaagattatggaagaataaatctaaaagtttaagaaaaaatgattttcaacctagaagtctatgtgcagccaaacagtcaagtaaagtcagaataaatacatattcagtcatgtaaggactcagggtaccctttcttggcaggtattttttaaaagcatgtgctattggccaggcaggaaatggcttatgcctgtaatcctagcactttggaaggcaaagatggatggaacatttgaggtcagcatttcgagaccatcctggccaacatggcaaaacctcgtccctgctaaaaatacaaaaattaggtgggcatagtggcgcatgcctgcagtcccagccacacaggaggctgagccccagttcaatagatacacgatgccactggtgtggcaacacgtgtgtgtggatggagtgaggtgcagaagcaggtggtggtgggctctgagaagggctgattgaatggtctctttattccctttataaattttcctcccttggaagattgacctttgtaaagaagaaaaacatgttagaagaaaaatggaaaagaactctgcatgccctcagctcagatgccatctcctctgggagctcctctggcccctgccaaggctggatcagatgccctcagggcacacacgatgctgatccagggccatctgtggcccagactctgggtccctcatgcagccctcaccactgctcaggaggccacaggaacagaggaatcactggcccattttacagacgggaaagctggacccggagaagtgaagcaactttcctgactcacagtgggtgagggcctcccacactctttcccctgccccatgctgtttccaagggacttccacaggcacaggaagcaggctgagtgcatagcaggagtacagcgctgctgcccagggatggagcaggagggccagggagagagagacaggggtgcccctggtgcccacagagacaggtctgtaaagcccatgaacaaactctcagcagggcggggacgggtgaatggggctggggcccacaacccataccacaggcacctggtctacacaggtctgtaggcctgtgcagatacctggctccttgaccaaggagggtgataaggccccacctgaccccagagatttcgccacctggttaggtgggcaggaggatagtctctctggagctctgggtcatggactctcagaggtagggagtgagtcagcatggccaaaaggtggagacccagtcacccacggatgcttgggatgggcgagcctcctggggcgaagccttctagggtctagggtcccacatggtggtccccggagggctttctgttcttccaggccctgcagaggagaccaaggctcagctggcagctgtggggccagattctcctctttgcctaggggagagcccccgcagcaccccttgagagcccctggggacctgcctggggcacaccctggcccccaggaagcccggctctgggagcactgcagccaggatggaggaggcagtcttcagagaggcactgtctaggccagccctgtggggagggaaggccagatgggggaacctggaggggcttgtgaactggttcctgaccctagaaacccagcagaggtggactcgaagcccattctggggagaaggcaccggcaggcttctccgcctgaggtctgccctcctgagggtgccaggagagcacagccctgggaagactgtagcctgggctgtgacctgaggactaggaagcgtttatgacagacatggagaggcctaagtccctgctgaagcccagcatcacatcccattcctgagcaccaaaggccccaggccctgggtaagagaagcttcctaaagggcatcctgagggccccgccctgatcacctcttctttggagaatttcaggagggaggctggcatgggccagacaactggctggacagggaagaggtgggaatatctggacctcgcctgcctctcgccacactccccgcttccctcctcactgtagccaaagttctccctgtgctttccaccgacagttcatggcctgtgcgtgctattccttctgtctggaacgcccttttcccctttgcttcccctttctaattcgtcatttttcaggtctcaccttagaagtcacttcctccaggaagtccttcctgccttgtcctcctctgatctgggctggatgtaagcctctgtgcttccaggacgtcctgcctctcaccctcacccccggatggagttgctggttttcccacctgtctccctctcaccctcacccccggatggagttgctggcattcccacctatctcccctctcaccctcacccccggatggagttgctggcattcccacctatctcccctctcaccctcacccccggatggagttgctggctttccaacctatctccctctcaccctcacccccggatggagttgctggctttcccacttgtcttccctgccaggccagaggcttccagcgggtcggccctggctctgccctgctcagtgttggagcccacatgccttgccaggtgtgcagtgcttagtatgttctcagtccatgtttttgagtgaacaaatagatacgtgaaaaaaaacccaaaatcacccccaaaagatgtgatcatttcccaggcccaatgggaagatctctgcccatgtttcctccaagtggacgccttgccctgggcactgcccccgtgtgtgtgtgtgtgtgcacgactgcctgcatgtgtgtacatttgtgtgcatgtgcatgtgtgtgcaagtctgtgcatttgtgtgtacatttatgtgtgtgggtgtgtgtgcgcatgtgtatgtgtgtattcatgtgtgtgtgttcgtgtgtgttcatgtgtatgtgtgtgtgttcgtgtgtgtgtgtgtgtgtgttcgtgtgcatgcacgtaaagggtgctcacctcctcctgagctccttcagggcaccgctccagcacgggcccaggtaatcccccaggagctttagctgctcccagctcctcccgatgaggtgcatccgctccacatgctcgtacagagatgcgtttgccatctgcaggttgatgaggggctgggcccagatctgcatcagaaacttcagggcctgcctgcagatctgggggcaccaccaggcattagggatgggaaggaatcgctgttcaatgagcactgcccggccaggtgccacatgacctcctcacttacctgaggggctatcttcattttacagatggggaaactgaggctcagggagatgaggggatttggctagggtcacccagcttgtaaatggtacagtcaagctctgaacccagtttatctgactcccaaacccactctccctctaagggcaagggtcgctgccccctccccaaccatgctgagatgagggagggactgctttggttaacgccccctccctctgggcctcacagatcagggtctctgggttcaggaacccttggagctctttccccagagttgtttcctggccatgcccatcctattcctggagtcagagtgccacagcagacacatctgagccgagggctccctgtgaccttcctccctctcccacagaggcagccttccaagttttctacccccgactacacagtggagctgaagagcaccactctctgctgggcccctaaaacaaatccagtaagaagaacgtgctggaggtgagtggtgggggtggggagaaggagggaaggggcttagtgatgcctgccagccctctgaaactagtgacctggaaatgacctgggggtttttgacccttaattccctatgagccaacactgagtgcagcttttggctgtattaatagaggtaagagtccagagccagagaggtgatattggtgcagttgctggcagtgctctgggacccttactgtaggcaagccccaagtaggaggacctgggaagaattggggctaccattctcagggctcaaggccaaagctgcatccccgccccaggggacctgtcctgtgtttctagcatcacagattctgcagttccccctccaggagctgagttaataataatccttgccctggagggtggtgaggagtagggcctctggaagaggaaattctcatgcctagaatggcagccctcgtcccagcctgagagagacaggaggctccgtgtccttggctgcttactgtgacaggcctggttgggaaacctctttctccccaggtgcccttccctgtccctgagccaaagccccatttctgtctggactgcatccccagtgaataaaccggggcagtgggcaagactaccaggttacccccacaggaagggagagaagacccaggatgggtactcccaatgccacacccttcactgtccacgtcttatcttgtttttaaactactcttaccctgacctcagtccctagaaggtttgaggcagatcacaacagaaacacacgtggtgaactggcaaattcactgaaaagccaggaccacaaaaaacaagttagagatgggactcaagatggagaggaattagggggcagatgatgtacaggtgctaaggtgtggttgctgaagaaaatttagctctgactttcctgctaggtaaggtgaaaagagaggggctatcaggtgcatgtctctttgttgttgaaaaaataataaaacccacccagatgttgagggaatcaaagctttttcctaacccttcgctcttaaatttcttgtgtgtagctctgtgaacatgggatctagaaggacaagtcaggtaccctgcaaaacacctccagggaggtttaatggggctgcttcaggtggcattattatgatgaaggccagcagcatgacctcatgtctcagctcagaaaaagcaattctgcaaagaacctgactgtgtagtttcttgattattcaccaagctccattcagttctagaaccaggatatctacaaagcaaagttggaaaactggtttcatctcatgagctactctgatgactaggtctggagtcttgtggggttttgtttttattttttgtttctgtttttgtttttgtttttagagacaagggagcttgggtttcctttctacccagcaggcatggctcagtggcagacaccaaccactggcatctgggttgtatttcataatttgcacagtacttgcagaaccttgtctcatttaagctttgtaataaccccacaaaaatagctggtagtagctgaattttacagacactgaaatggaagcttgaagaaattaggtgaaggtcagggtgaggcagctagtgagcagcagagcccgccctctggtcccaaggcccagggacccttctgcctgcccctgggggagtcagggcctttgccttttgcccagggcacacccactggccgctcccactggccccccgctgtggagacacctctacactgtaagaactatccaaccaagggggccaaagccagccttgctccacagtcctgaggcatcagacactgtgcagactgccctgccccctgctggctgcctgtctgcttcccgtggccagccctgaccgcggcccctgtcccccagccacttattgctcgccacagcccctactctgctgcttccattctggggcccgagtggacgggtggacctagaggaggctggcattgctgagccagcagcagggacactagacacaggcaacaagggtaatggagcagaacacaggctctggaaccagccaacatggcaaaaccctatctctactggaaatacaataatcagctgggtgtggtggtgcacgtctgtaatcccagctcctggggaggccgaggcacttgagcccaagagtcagaggttgcggtgagctgagatcataccactgtactccagcctgggtgacagagcaagactctgtctcaaaaaaaaaaaaaaaaaaaaaggaagcactggaggacattaaacaaatagcagatcctccagcctggccaacataaaaatacaaaaattagctgggcatggtggcgggtgcctgtaatcccagctactcgggaggctgagataggagaatcacttgaacccaggaggctgaggctgcagtgagccgagatcgcgccactgcactccagcctgggcgacaaagggagactccatctcaaaacaaacaaacaaacaaacaaaacaaaacaaaacaaatagtagatctggtcaagcccctcagagctgttacataaaccaactactgagggtaaagacctttggaaggaccatttaaaacacctggggcttcatcgggctggatttgctcggagctacaggtggaatcaagagttctctataatcatcacttgcacagcgtagttttcagggaaatattttcctatttgacaggtgaaacagtatttttcacctgcctgtaggcagttttgagacaatatagtacttttccagaagtgcttccctgaatgactgcgcacgattatgatgacattctggaatggggttttataacacttgtgggaacacgctgcccctttagcaatggaaaacaggacttcagagctgccttctgaaaggcctggtccctgcagatggaacccacctgggaccctcctggtcacctacccatctgcctccagtgtaccacccggaagctcttatgcccctgtgcgggggctgcctgggggcattagaccaagcatgtgtgccttccccaggaagcaggcaaaccaaggaagcaggcaaacccagatctgaatgccagccacaccacttcatcactatgtgaccggacaggtttcctaacctctctgagcacccatttcttcagctgtaaaataatgatagttcttacagtgtgttgttgtaaagattaattagtagggggagttctgagtggtggaaatatgagtggtggttattcttgactttgtgcctacctttaaaaaaaattaacagatcctttccaccacagaagctcccaagttactaggagctgactctggccataccactcactctctacccatctcccaggctgcttccagcagatcggcttctttgtacgacccaagctctgtgccttctctggcctctattactgtgacatctgccaccaagatgatgcctcagtgattctggccaggatcatccacagctgggacctcaccaagcacctggtaagtctcgagcccagctcgtcacagccactcagggctggtgagggacagaggggtgttcaatcctctttgctgctgctgttcatctgtttagaggagtttggctcctctaaacaagggaagctggggtcactggttcaggcactgtgacgtgggggagctaaccaagagaaaagcttggtgcctgtccacagccctgggcagagctccgtcggtggctgtcttggtccccaggagggagtctgaggatggtttcctgcagctacagacataaccgcttaaggcaccagcagataaatgactgattaggtagatagatagatagatagatagatagatagatagatagacagacagataggcaggtggatggtggatgagtggatgggtaggtggatggttacctgggcaggtgaatgagtaaatgggtaggtggatgagtggatgggttggtgggtaggtggatcagtaggtagatgggtagataggtgggtgaacgggtagatagctagatgggtaggtggatgggtaggtagatgggtagatgggtgggtgattgtgtagatggctagctgggtagatgggtaggtggatgggtagatgggtgggcagtgtgtagatgggtgggtggatgggtgaatcggtaagtggatgggtagatgggctggccagcgagctggctataccttggagcagtcatccttaaagactatcaagtaggcgtatccatgaattaatgacgaggaaccaagaagatagtaaatgacaaagctaaatgcagtagcaaagctgatacaaggtgacatggagctcaaagaaggagcagatttttaataatatgtctaaagcaatagtttcataaatgcaattgttagcttagaggaagtaataatgacccacatggtgaatggtacatggtagaatgcatagctttctatgattctatagcaagctgaagaaagagaaaaaagaacgtgcactgtggtagactataaaaaactgcttcaacaaaattttcaactgaaattggtcttccagacctttctccacccctttatcctgaatgggcttctataaaatccccaacaaatagaatatacagagaatgacagtgtaggatttctgaggataagtcataaaagttaatacagctcactgtctctattgaagcttgttgtggaatttagtaccaggtataaggaagccaatgccatgcagaaagtcagcatgtaagtcttccaacagatagcatcagctaacatctaagccaatggctggcatcaacttccagatttgtgagtaagcaatctttagacaattctagcaacaagtctttgcaatacccccccaatgaccatgatcagagcaaaatcaaaataaaattgctgctttatgaaaataaacgttgtcattgttttaagccacttaatttacggttagtttattacaaagaaatagatgaccagtaaaaactttgagtagtgaagatgtaagagcagtaaggattaaaagtgctgaaagaactggaagtgaacagcagaggaggaaaagttaagaaacaaatgagagctcctgagaatgtcaaaaacagagagatttgcattttggctgaggataagaagaatatagatcaaaggcatagagaaaaaatgtgcttgaaatatagactaaactcccagagtttcagctattgataaaattcagatttttttcacgagttcaagagatcaagaccatcctggccaacatggtgaaaccctgtctctactaaaaatacaaaaattagctgggcgtggtggcggtgcctgtagtcccagctactccggaggctgacgcaggaaaatcactttaacccgggaggcagaggctgcagtgagctgagattgtgccactgcactccagcctggcgacagagtgagactccgtctcaaaaaaaaaaaaaaagaaaaaaaagaaaagtcagattttttcagacagaagtgttttatcagcattcaaaataaatttactaagaaaatcacagtgtctattttgggaaaagtaaccatctcctagtccaactgtctacctaagagaaaagtctgaaatatatatagcacttaattgttattgtatttcttttctcatagttaaaatcattgaatgccatctttgcatgaaaatattgtgcagagttcaaaacactaaaaatatacgagtagttcttggtttttggtcataaaaacaaactatattagatgagataaaagaactactgcttttcatttattcaataatagttatattgaatctttctgccattggtctttacatatactcagtggaagaacgagtttattaataatatctcaaaattttaaaataaactgaaaattcaaaattatagagctaaatttacatataatgctacactaacaaaattctgtgtggtcaaggatatttatttgaaaataattttatatttagttaatgataagtagccagataattacttttctatgaagaaatgctgaaaaggatgagaaggcactattttaaaatgaacgtctgagatttaatcagaaaaccattggtcaataactgttttaaaatcactgaaatacaaatcatctgacatatgttgtttaccttaagtatatactcattttgtaaatttttttaccccctgacacacacacacacacacacacacacacacaaacacacacacaagcactattcccagctttctcttcatggagtaatttaatttattccattttaaaaatcttagactcagaaaataataaataattaaggaatattatagaaccgattacatgatttcagtaagctaaaaatgttcactctgtatttctcactatatcaatgagattctttattatacaagtgtaacagctcttaagagcaattagttaagtaaaattttgtcagaagatatgaggattactctcttatttaaaaaaagtaacttgccaacaaacaggcatgattgaattagagaagcttcagttttttgtgaccctgctcctgaagtgaaacttggatcctaaacaccaaatggtgggttcacctgccatgatacatgacatttgttttatcaaacagcataaactccgttaaagatgttccttgaaaggtctaacttcatgtataccctgccatcagagctgatctaccatagatagactaacaaataccaaccgaatacaatctaatgcacaaaggacagaaaaataaattacattttcccccaagtttacaaaattgattgctcattaagatgtttatggccgggtgcagtggctcacgcctgtaatcccagcacttagggaggccaaggcaggcagatcacgaggtcaagagatcaagaccatcctggccaacatggtgaaaccccgtctctactaaaaatacaaattagctgggcatggtagcgcacctgttgtcccagctactcaggaggctgaggcaggagaatcgcttgaacccgggaggtcgaggttgcagtgtgctgagtttgtgccactgcactccagcctggtgacagggcaagactctgtctaaaaaataataataaaataagaagatgtttatatgtacatcttaatttaattcactatctcagattatttttaaatttgcctttaagcttaatggaaaattcccctgaactgtggtataatttgagttcaaaatgtattaatcatatccaaatcttcatcttgaattaggaaatgttcatttattataagccatttctaaaattgcttttaaacctatacaatatgaatatgattgggttactaaggtaagcctggacatgataaagtaggttgtaaaaatttagaatttttaatcccagtaatcaaatcagcattctaggaaatcaagtatgatatctattgaaagggtgatgacacctgaattatggtattatgcttttatagccagcttctgaaactgtaatatcactgagtatcacagacaagacacaataataaggttacccgcagagaaaaggtaaaatgccttgtaaatttaactttctagattttcaagtttcaagtttttgtactaaatactaaagttgtactaaagttgaagccttatgttcagaaatgttcctgtatctaaaaaataagcttatggcatttccccataaaacacatttctaagtcccaagatggagtaattagagagatgtttctgcatggaattctataaattgtcacacctgtttagttgaacaatgaatgaaaatatgcagacttgaacagaattcaagaaattattaaaagacttacactttaccagcagaaattacttaatataggaaaaacatcagtcatttttcagggagtcatcaagggatttttaaatcactaaaaatgacaaataagaagcggaaaattatcacaattatataagcagtattactgcgatgtacagaacatctgtcaccagtgatagccattcaacattctacaaggggagccaattgacgcattcaatattacaaggctaaaagcagttattactttttttcacttttaaaacaaaacgcaatcatgtaattttcagttagtataaaaattgaatgcaccctgagtcaaaaataagcaggtatcatattttccatatggccatttgtagcaaatcatacatttcatttttgagaaatggtatatttttcaaagtatttttctgtgtgttaataaaacatggagagaaagctgtgattctttctttctatacatggcaataagagtgtacaatactcagtcagacacggtggctcatgcctgtaatcccagcactttaggaggccgaggccggtggatcatgaggtcaggagttcaagaccatcctggctaacatggtgaaaccccatctctactaaaaatacaaaacattagctgggcatggtggcatgcgcctgtagtcccagctactctggaggctgaagcaggagaatcacttgaacccaggaggcgaagtttgcagtgagtcaagatcgtgccactgcactccagcatgggcaacagagtgagactctgtctcaaaaaaaaaaaaaaaagaaaaagaaaaccagagtgtacaatactcaaatataactctgtgatttcagactaaaaaattgtgtagcacttattttcaaatatgtctgtcagaagagaatgataatactttgaacttcttttaagattaagaacatccccacatcttgtactcttctcattatcaaacatttattcaataccttatatatgctgtaaaatagggctgtaaatttgaatcaatcacaggctttgctgtcaagaactttgcaaatcagtaggagaagtaaaggaaggggatttttgcagaagtgaaggaaaagaagagagactttattctagagaagatataatatatgagtgatggcagagaaaatatgaatgtatatggcctgttcataatacactcactaacactagttgattagagcaaatgattggttaagaaaatattgaaaaatgcttataaaagtagatagacatcaattacataaacacctgaatgccataaaaaggataccggatttgactgtattcacaaaatggtggaaataaaattaaatgagaagttgttatgccaaacaatagcaaaagtacccaaagctaaaattaattaaatgcttaccaagtattttacattaattggttcatttcatcttaagaaaaacacatgaaaaatgctactcaattctctttccccttaaattcatcctcttgacagtgttccatttactggtttcctcatttatattagtgaatttcatttttaaacaattaccaaattatagtgaagtcaggaccactttacaagaaattgatctttatgcctaattatacataattgattttagttaaatgtcccaaattactgtttctacttgaaagggccctgtttagaatcactgaagagttgcttgtttcactggaaacacagaaaagttctgaaaattaaacagaaagagagagaaagccacattgacatttgctgttctgtgtcggtggtgtagctttttttcagatgaactctctcactgaaaactacaaaagttctgtataaaaacacacagaaatctgcacaaagtcctttaagaacgaacaaaaccaggcagaaatagaatgcatgagtaaactcaaaaacttatccaaagaaattatctaatctgaagaatagtgagaggaccacaaatggttgaactaaaatgaacagagcctcagtgaccagtaggagaattctgagtctaccatatgtgtaactgtagaaggaagggatagagatattttggcaaataactccttggcaaatatttggcaaatatcaaaagaggctgaattaaaattctggtagaatttttaaaataaattgacaggtgaattctaagatttatatgtatatgcaaaggatctagaatagtcagaacaattttgataaagactaagaaactggaggatttgtttcatagaacctcaagttttaatataaatatacactatcaagagacactggtattggccaaggaaagaaaaacagaccaatagcatagaatagagattacagaactagacatacacacatatgtgtttaatttatttttgataagatgccaagcaaatctatgggtaaaagaaagagttgccacatggtgctgaactgtatttccatatattaaaaaaaataaaccaaccttccatgaaatgcaaaaattaactgagtggataataaaccttaacagagggctaaataactgtatgtattctagaagaacacattgaagaaattacttgtgactttggaaaatgcaaatgtttcctaaagaaggcacaacacctacaaaatgtgttttaaaacgataaattgattttattaacattgaaaacttttgcttatcaaaatacatgaaaaaaaaataaaaaggtggccgggcacagtggctcacacctgtaatcccagcactttgggaggctgaggcgggcagatcatgaggtcaggagaccaagaccatcctggccaacatgacgaaaccccgtctctactaaaaagacaagaaaaaaaaattagctgggcgtggtggcgcgtgcctgtagtcccagctactcgggaggctgaggtaggagaattgcttgaacccaggaggtggaggtcacagtaagccgagatcgtgccactgcactccagcctggcgacagagtaagactctgtctctaaataaataaataaataaatatcaaaaaaataaagagccagagacagaaaaaaaattatttgtactatatgcatacctgacaagtgacttctatctaggacatacacagtttgacagattaattttccaacttctatcagaattgagtctcaaaataggattaaagttcaattattaaacatgaagaaagttatatctgatttagctcctgcctgcttttctttccatgaaccaaattctattcttcataaattctacccactggtgagtgttatgcaaatggagaaatatgtactttacattggaaaataatctgtctacctctgatttaaactgctaactattttaaatgtcttacactattctctgctagtcagattggatctcttgttatctgtccaaaatggtaactgaagttactgaactgtaaaattactatgctatacattattagttcatgacacattttcaaatatgaatgtgacgtagaaacaggtgattgtcagtttaactctatctctaaccccctgccatgtagagaattgaactagccctcactctcataagtggaattttaaaaaataatgtgagttggccgggcgcggtggctcactcctgtaatcccagcactttgggaggccgaggcgggcggatcacgaggtcaggagatcgagaccacggtgaaaccccgtctctactaaaaatacaaaaaattagccgggcgcagcggcgggcgcctgtagtcccagctactcgggaggctgaggcaggagaatggcgtgaacccggaaggcggagcttgcagtgagcggagatcgcgccacagcagtcccgcctgggcgacagaacgagactccgtctcaaaaaaaaaaaaaaaaaaaaaaaaaatgtgagttacatgagctgataagcacacatgtatagtcaacgttaaggcttagtatttatgaaatttggaatgatgatttatggcaaatgtttaacacatttaataatgtaaatactttttaaggcattgaataggtaggagttcatataagtttactctgggttggttgtttactgaactgtaaacattttttattcattgaatgccattgcaaaacctttttaacatcactcatcttgggttcaaacatcccagcatccttacaaataaactttcctatcttgaaactaaatttgtttttgtttttgctttaatttagtcttaaactaaaaacaatgagtttattttctgacaatcacctgtttctacatcacattcatatttgaaaatgtgtcatgaactaataatgtatagcatagtaattttaacatttccttgcattgatcaaaaatacacctttaaaatttagcaataaatcttatacaattacaatgaatcactttctaatggatgcacaaatcttatataacgttttcaaatttgggattacaatgaagaataaattttcatgtggctttagattagattttaattcttaattttacttttataatgtttgaaaattaagtttgacctcatggctaattattcttagatatactctatttcacaatatttgagatatctgaaaaatcaagaatttgtttttctaagagctctttagttttgaaataggattgtcatactctacaccataattatttgcagtcttaaagtaaatttgtattagaagtgggttattaaactgctttaggtatgacaactatagtattccaaatgatatgaattccaaaattctgtttggaatgaaattcaggagcaacgagaatttgacataaaggctagttttataataatcatcggttgataaggcattagaaatattaattttttttcttttttttttttttttgagacagagtctcgctctgtcgcccaggctggagtgcagtggggcgatctcggctcactgcaagctccacctcccagattcacaccattctcctgcctcagcctcccgagtagctgggactacggcgcccgccaccacacctggctaattttttgtatttttagtagagatggggtttcactgtgttagccaggatggtctcaatctcctgacctcgtgatctgcccgcctcggcctcccaaagtgctggcattatgggcatgagccaccgcgcccggccgaaatattaattttctgtacttttactatgactcattagaacataatctcaattatgaatccagattcatatataaaataatatatattaatatgcacagttgatcattgtggaaaatatacatatattaatttctgaagagttttgaagaaaccaataataaaatattagaaaatatgtatgaaataaccagatagatgatgtattagaaggaggagcaagtcacgtcttacatggatggcagcaggcaaagacagagagcttgtgcagaggaactcctttttttaaaaccatcagatctcgtgagacttattcactatcatgagaatagcacaggaaagacctgcccccatgattcaattacctcctaccaggtccctcccacaacatgtgggaattccaggtgagacttgggtggggacacagtcaagccatatcagatggatagatatagaaatattttatacatcttttaaatgtgatgcttcctgtacacttttggcacaggctgtaggtctcaaaataatgcaaaaagtacccctattatagttactgaaccttcacagggcaatcattctagttttctcaggatagtactagtttatgctcatggagtagaagatagaatattgccgaagtatcagttgtctccattggagccaaacttgaagaagctgtgtgataagacttaatggggagctgggtgcagtggctcacgcctgtaatcccagcacttttggaggctgaggcgggcggatcacctgaggtcaggagtttgagaccagcctggccaacatggtggaaccctctctctattaaaaatacaaaaattatccaggcatggtggcacgcaaggcaattatctataaaccctgtgacaagactggtagcctcaattctcctaagtaacataaacataactcataatttcctgtggttcctactgaccaagctcactggcagccaggaagccttggctggaagagcagtattattagtaaccttctcttcataccaactgaaataaggaggaattagctagtttttggctgcttgggtcttcaaagtcctacaagctgccctcgaataattgatacgatacaatttgcatctggaaagcattgaaaaagagaggtaggttatcactggttacattaccatattatcctcatgttaaaaaataattttctgcttatgtatatctctatagttcacactcctagaaaagatgatggcagaatttaaagcaccaagtggtgatttatcaaacccatccctatttattttaatgcaactataaataatagtacttggttaaaaaatccaggacgaatggtatatatatgtatatatatgtatttttttatctgaaaattgttcatcacattcacaaatgaaactatttgaagtaatgttgctgcattttccacggaaacagatatgtggttgacatcggccaattatttctgagcaattcattcctataacaatgaaaaaaggtttatttacattgcatgtcaatattataatcatcagttttccctcaattctttaataaaaatgtcaaattctgacaaatataatttcagttatgaaaccatgttatatgatgctgcatttaaattgaaataaaaattaattttgatactttacataagtttttcctcttctgaccccagactataatatccaaatattttttctggctagtggtatttgaactttatttaatttacataatattttaaaattttaattgttttttcatggtagataatattagtacatgtaagtaccagtttttcaacttacactgataatattgcagtggtaatttacaaagtgacacattcaaatgtgcattgtgtctcacccttatgccctagccaaaggaacaattcaaaatgagaaacagctgcctggattttcagaatatgtgcacaaacttgcaaattcaacacttctttgcccttgctggcctatcaaattttccaaatctcacttacacatactattgtggtcccactatatcaggtgacatagccttccataacatacttgtactatgcatatttaatcatcttataatacgcttagtagaggaatgtgccttggaaatctcagggcatagcaagtggacaaatgctgttacaaaacaactgcatgtaatttggcaatatgcttttttcctcagtttaattaagctcttaatttaatttataagcagcttttgccattatcattgatgtctttccaattccttatatactgacatccctgcctcactaatgcggaactcttctttcttcatttacctccaagcaatcctaaacataatgaaaatataaataatgaaattataaataaaaatcattatgtttcaaaatgttttccaaacataaaaactaaattaacagtagaatgcttaatagtccatgccctaattacctaattaaaccttagtgagttttatgagctaaattgtgcccacccacccccaccaaattcacatgttgaagtcctaaccctcagtatcttacagtatccatatttggagacaacgtctttagagaagtacacaattaaggttaaataaggtcagtagggtgcgtcctaatccaatgtgactggcgtgcttctaagaggagaacatttacacacagacacacacattgctttcgcaccaggtaggtggactacaacagtctaagtatgaatgtggatgagggacgtcactcaggtattcttgctacgctaacttttgccaacagtatggatgactttaagtgtatacgtaatgacaggttatttacgtctcttctccagctcatttttaggatctgtcctccttaacccccactttgggaattcagaccaccttactaataggtttgaattcctagctgggcacatatgcagtggtagggctttcttgacacatgcattccagaataatctagtaatttgcagttgttcacctgttatgtcctctcctttttcaagagagctacattcaatgtggatttagattatgctaataaagacagcgttcttacctgtgtgcagatcatctcaaaacaaaatttttggccaggcacagtggctcatgcctgtaatgccagccctttgggaggccgaggtgggcagatcacctgaggtcacgatttggagaacagcctggccaacatggtgaaaccctgtctctacttgaaacacaaaaaacagctgtgcttggtggcacacgcttgtaatcccagctacttggtaggctgaggcaggagaattgcttgaaaccaggaggcggaggttgccgtgggccaagatcacaccactgcactgcagcctcggcaacagagcaagactccatctcaaaaaaaaaaaaaaaaaaaaaaaaaaagattgagtacattcataatgctgagtacaataaatttccacaaaacttataatgaaatctggatccatatttcttcttgatggcttctcccacgtcttgagtccatgattgaccttatattttatttcttctgcactcctgcctattcaagcaattcatggctctgaaggagcgcattggctggagatacagcctcctcttcgtgggcctactacagttaaacattgtcgtcttcggagcactgctcagacccatcatcatcagaggaccagcgtcaccaaaaatagtcatccaggaaaatcggaaagaagcacagtatatgcttgaaaatgagaaaacacgaacctcaatagactccattgactcaggagtagaactaactacctcacctaaaaatgtgcctactcacactaacccagaactggagccgaaggcagacctgcagcaggtcctggtgaagaccagccccaggccaagcaaaaagaaagccccgctattagacttctccattttgaaagagaaaagttttatttgttatgcattatttggtctccttgcgacactgtgattctttgcaccttccttgtacatcattcctctgggcattagtctgggcattgaccaggacagcgctgcttttttattatctacaatggccattgcagaagttttcaggaggatcggagctggttttgtcctcaacagagagcccattcgtgtgatttacattgagctcatctgcgtcatcttattgactgtgtctctgtttgcctttacttttgctagggaattctggggtctaatgtcatgtagcgtattttttgggtttatggttggaacaacaggagggacccacattccactgcttgctgaggatgatgttgtgggcattgagaagatgtcttctgcagctggggtctacatcttcattcagagcatagcaggactggctggaccaccccttgcgggtaatttaaatacacaaaatacaagcgcttgtctactttcccttatgaattgtgctagcttcctgttcaagccataaaaaaacttactgctgttttatatttccattgaattttagagctgccagggattagagattacttgagccagccctcttgatttaaatatgaggaaactggccaggcacggtggctcacgcctgtaatcccagcacttccggagatcaaaaccatcctgactaatacggtgaaaccccgtctctgctaaaaatacaaaaaattagctggcatgtgtggtggtgggcacctgtagacccagctactcgggaggctgaggcaggagaatggcgtgaacccaggaggtggagcttgcagtgagccgagatcatgccactgcactccagcctgggcgacaaagcgagactctgtctcaaaaataaataaataaataaataaataaataaataaataaggaaactgaaggccaaagaattgaaaccaaaggtcacatggtaaattagtggttgaatcaggactggaagctgtgtctgcagtccagaactgacccaggctttttttttttttttttttttgagacggagattcgctttgtcaccagactggagtgcagtggcccgatctcggctcactgcaacctcctcctcccgggttcacgccattctcctgcctcagccttccaagtagctgggactacaggcgcccaccaccacgcccggctaagttttgtatttttagtagagacggggtttcaccatgttggccaggatggtcttgatttcttgacctcatgatccgcccgccacggcttcccaaagtactgggattataggtgtgagccaccgtgcccggtcgacccaggctttttctgtcaccttgccttctctcatgctagacaggaacgcatggatttatcaccttcagagcccacctgacttttggaatgacagaaatatcggacttctgtaagtcatcttcccttcttaggaaaggtatttgggaatagaaagcagcactctgtaaatacctaattgatttgtatagaatgtttccttgtaagagggacataggtatgtttcatagcttagatcccaaatgggtctttaaagtgttgtgattagaaattgtaccccctgtcaaaagatacctacagtggccaggcgcagtggctaatgcctctaatcccaacactttgggaggatgaggcgggcagatcatttgaggtcaggagttccagaccagcctggtcaacatggcaaaaccccgtctctactaaaaatacgaaaagtagccgggcatggtggcaggcgcctgtaatcccagctattcgggaggctgagctgggagaatcgcttgaacctgggaggcggaggttgcagtgacccaagatcgtgccatcgcactccagctggggcgacaagaataaaactcagtctcaaaacaaacaaacaaacaaacaaacacctaaagtgaactcaagtgaaaataatacagttccttcctaccgaagaatattaccttttcaaagaagtatgcatcgaaatgtcccaggttttaggtcctctgctaggacaggcttagcccaagaagaacaagtatattgggtgtttgtctctttctcctctccagtctagtaaagatttctgcccttaacacccatttttctttagaaacacaaaagaaaacaaggaaggcaatgaaactgagaggcttctgaatgggatggtcgcctgggtgaggggcttatgtctaggaaggatgctgttaacggacgccatgctctcttccaggtttgttggtggaccaaagtaagatctacagcagggccttctactcctgcgcagctggcatggccctggctgctgtgtgcctcgccctggtgagaccgtgtaagatgggactgtgccagcatcatcactcaggtgaaacaaaggtagtgagccatcgtgggaagactttacaggacatacctgaagactttctggaaatggatcttgcaaaaaatgagcacagagttcacgtgcaaatggagccggtatgacacactttcttacaacaacagccactgtgttggctggagagggatggggtgggcccaacggagacacaaggaggtagaggagctaacccctctactccactttcaaaactacattttaaagggaatgtgtatgtgaagagcactaccaacatcgcttttgttttaagttttcctttttgcttgtttttaaagccaaaacaaaaaacaaccaagcactcttccatatataaatctggctgtattcagtagcaatacaaaagatatgtagaaagactctttggttcacattccaatattaaaatagtgacacgaactggcaaagtggttttaaaagctttcacatgggataaatgattttctttctttcttttctttcttcgtatggtcttgtcagaataaactactatcttgaataaaacaacatccaacccaggtcattgaaatgaaattggccagtcaaaaaaaaaaaaaaagacttcaatcatttaaaaaattcctaattttcagaaatatgaataaatggtttttgttaaaccctttgtaaaatactgaggttcccattaacaaattatggcttctgcttgctggaaatgaagtatagtttaagaccaaacattttactaataagcaaattttaagtacatatataacttgaacttcataaatgtgaagattaccacttctttttatggccagtccttaccagaagtgtttcagtacagaatatacaaaatggcatttaaaaatgtgtttcctgttgcttttagttatacagaaatatgtgactgtagtgtctttaatttaaaccgctatttattattaagttattctaggatgattaatcaaaagaaataaaatctgagacataagcagcatttttacctcctttctgcagtcctttaaatgcctcacagaatacgtcttatcttgtaaaaaatactttcataaaaggccaagttgtcatgattcttccatttgattaagggcaacatgtgctatttaaaggggaaaaaataacggatagcaaatcaccttagctttcaaaaataatttgttttatcatctaagaatacttgaggaacttctttgatcagaattatatttcattgaactgttaaagcatttctgatttaaagaaaaaaccatctaattgttgaagcatttctgtatttcacatgggggtaacagagacatttatgttatagcgagttacaagttgcaatttacatcttctataactcacaacttgattgttctaagttgccagaggtatcgggtaactggtcattgtttttttgttgttgttgttgttgtttgttttattttttatttttggagtcacactacatgtatagtattgctcacgttacagttttctgtaaagaggacaagtgtcaggataataggtggactttttactcacctattttactgcaatctcaccctgcaggtgacggtcaatgctcgctgctccatctttactcatcattaatgttaatttatgacaactcgggggaaaaacataacaagcctagtttggttacaggtacacacaagcttgaatatttctctgcactgaaatgaaagtggcatagttcatcaccacctgctacattttgtagagcatcttaccagccatagaaataggacaatctataaaactttggggagggtgggggaggaaatgacacagtgtctgtcaaaaacaggcataatctaaaacaaggtggatatagcaaatctctgccactgcttgagaagaactttgagcttgtggcagttttgcagacttacatgacttcagcactttacaacgtatttttactatgaatgttcaatacaatttaatatttataactgatttcagagggatctgctccatgtctattctgttacctgcatgaaaagagaatgcatgccaatttcagtatgtcaataatcaaggttttaaatgtttggaagaaaataaaaacaagattgctgatttgttctgtattagtgacattctggtacttctagatttgcaatacatttatggcttttttatttaaagatactgattttcttctgttataagatttttttattgactctcacagcattcagtatttgatgcaattaaagttataaaaactcaccaaagattcactccaaataaataattttttaacgtttatcttctgcaaaaccttttaactctactagagacacataaagtttcccaagaagtgtctactgaactttttatttatttatatttactagtatttttttttgagatggagtttcactcttgttgcccagactggagtgcaatggcacaatctcagctcactgcagcctcccaggttcaagtgattctcctgcctgagcctcccgagtagctgggattacaggtgcccgccaccacgcctggctaattttgtgtatttttagtagagatggggtttcaccatgttggccaggctggcctcaaactcctgacctcaggtgatccacctgcctcggcctctcaaagtgctcggattacaggtgtgagccatcgtgtgtggcctgaacttttaaatcattttttctggtcattgaaagcaggacaattttattttatgttgagtttttcatgcaaattacagcaccttagaaaaagactaaataattcaagggaaatattaagtaatgaataacaggagagcgaaataaaaattaaacaatataatcaaatgaagaagcatgttttcatctaagaattaagaatgaaagcagcgatggtatttaattattaatgaaaaatacatgaatgaaatgatatcatggtagccagagtaagcctatcaaaagtcataacggcaaatagttaaagactacaaccagttacagaatcgttccaagaactgttgcaacctgtaagtaaacagcacagactctacatgccagggtttggcaaactttttctgtaaaggtccagatagtaaatatttaaagctttgcaggccatgaggcctctgtctagtcaactctgccattgagggtcaaaagcagccacagacaatatataaatgaatgaatgtggcaatgtttcaatggaattttatttatggatactgaaatgtgaatttcacaagattttcatacaggaaatatatattttttcaatcacataaaaatgttaaacacacacacacacacacacacacacaattagctctcaagctgaaaaaaaaaaaattctagctccttcaccacatatctgtaacactggcacagatcagtaccaccagaagcaaagctctgaaaactaacagtcctgactcatgggaaaggattcattgtggtcaaagtaattcttagatcataactgccccaaaataggaaagatcaagcagctaacactttttcgttgttgttgttttgagacagagtcttgctctgtcaccccggctggagtgcagtggcacgatcttggctcactgcaacctccacctcccgagttcaagcaattctcctgcctcagcctcccaagtagctgggattacaggcatgcaccaccacacccagctaatttttgtatttttagtggagacaggattttgccatgttgggcaggctggtcttgaactcctgacctcaagtgatctgcccaccatggccttccaaagtgctgtgattacaggtgtgagccaccgtgcttggcattatagctaacgtatttgttaattatgttttctttttttttcctttttttttttctgagatggagtttcactcttgttgtccaggctggagtgcagtggtgcgatcttggctcactgcaacctccacctccaccacaccaggctgttaattatgttttcatttctcctgattaaaaagattctgctttaagattgttgacttcaagaagtttcagtataaaccttatgtagactttctctccccaaaactaaaattattctagttataaaaatgagttgggccgggcgcagtggctcacgcctataattccagctctttgggaggccgaggcgggtggatcgcctgaggtcgggagttcaataccagcctgaccaacatggaaaaaccccgtctctactaaaaatacaaaattaggcgggcgtggtggcacatgcctataatcccagctactcgggaggctgaggcaggagaattgcttgaacccgggagacggaggttgcagtgagccgagattgcgccattgcactccagcctgggcaacaagagcgaaactccgtctcaaaaaaagaattaagatcatgtactcttttaagacctatgtatccgtaactaatacaaaatgtgtccaaaccttttaacaaagttatacattttatactccaatagcatgtaatgtagcttttgagcatttatttgcctttccctttgcttaatacctggtgataaaatagaaaatggattctatgtcagcattcttgtggcacagattcaaatcaccaggtggtatttattagatttagatttccatactccaattcaactattgtaaattagaaatcatcatgatccttcagctgggcatggtggctcacacctgtaatcccacccagcactttgagaggccgaggtgggtggatcacttgaggtcaggagttcgagaccagcccagccaacatggtgaaatcctgtctctactaaaaatacaaaaattagccgggcatgttggtgcacgcctgtaatcccagctacttgggagggtgaggcagaagaatcacttgaacctgggaggtggaggttgcagtgagtcaagatcgcgccactgcacccaagcctgggcaacagagtgagactccatctcaaaaataataataataataaaaaataagaaatcatgatccttattttcacaagtttgcaaatatggggctcacaaggaactagagtttagaaaccattgcctttaaatctttaaacggtggccaggtgtggtggctcatccctataatcccagcacttcaggaagccaaggtgagtgaattgcttgagctcaggagttcaagaccagcctgggccacatggtgaaaccaaaattagccaggtgtggtggctcatgcctgtggtcccagctactcgagaggctgaggtgggaagatcacttgagcccagggggcagaggttgcaatgagtccagatggcaccactgcacacagccttggcaaagagtgagaacctgtctcaaaaaagaaaaattgtaatggttatgcacattacttaaaatgacctatttaaggaattcagacatgttacatgcaaaaatgatcactgctataaatatacattgcattgagaaaagagaagctgcccttgttttcagatttgtgtttatattgcatgtgtcctaagtgagggcgatcgtagcgtacagctgggccagccgccgttgcataagtaaggaaactgggtccccctagtgttcagttctcataatgactctcgaaaggtgcagaacaagaaaagtggcaagagaacttacaacttcgctatccgtgtaacaactcacccaaatcaaaattacttcaatgactatccgtttcctacagggaaagttagacgggaaacctgatgcccagaacatttccccaaatattattgagaaaatacatattgtggccatgtatttgtgtcatttatatgcctttccagcaactcaagaacaagcacgctaacttccctaacaacttatacaccctggaattcaaccaaaactttaagtaccttctctgcatcgacacctcccattcttagtctcaactttgtccctgagctcctgatttacatctgcctgcatggcagggcatggatataaactaagcatcttcaacttaaaatgtcctcagcagaactctggatcttcctcctcaaacccactcctccacacatccaatcggctctcctttctaaatatatccaggagctgactgcttctgccaactgcatcaggacccttgatccaagccaatatcatcttagctggattattacagtagtcttctagctggcctgcctgcttccactcttgcaacatgccaccccatcttaattttccatacagtagccagagtaatcttcttacagcacaagtctgacataaatccttggcaatgagccctgcgtgaactgcccgatggtatttcttttccctctgctcctgttatactagccccactggcttttttttttttttttttgagatagagtctcgctctgttgcccaggctggagtgcagtggcatgatctcggctcactgcaacctctgcctcccaagttcaagcaattctcctgcctcagcctcccaagtagctgggactacaggcacatgccaccacgcccggctaattttttgtatttttaatagagacggggtttcactatgttagccaggatggtttctatctcctgacctcatgatccgcccgccttggcctcccaaagtgttgggattacaggcgtgagccaccacgcccagcccccccactttttttttttttttgagatggagtttcactcttgttgcccaggctggagtgcaaaggcacaatcttggctcactgcaacttctacctctgggttcaagtgattctcctgcctcagcctcccgagtatagctgagattacaggtgcccaccaccatgcctggctaatttttttttttttttttgtatttttagtagagatggggttttgccatgttagccatgatggtctcaatctcctgaactggtgatccgcctgcctcggtctcccgaagtgctgagattacaggtgtgagccacgacacccagcctctcttattgtttctggaattgttcttcttgttgcaagcttcaggctttggcatttgtggtttcctttgcttggtactcccttgcctgagatgtatatgcagtgtgacccttcaatttgatcacttccaaatgctacctccctagggaggcattcctgtctatcctattcaaaatggtacttgtttctatttgtttactttgacattaggttataacagcatccactttgggaggctaaggtgggcagactgcttgagcccaggagtttgagaccagcctggtcaacatggtaaaactcctctctacaaaaagtacaaaaattagccaggtgcggtggcacgtgcctgtactcccagctacttgggaagctgaggcgggaggaccacttgagcccaggaggcagaggatatagtgagccaagatcacaccactgcactctagcctggatgacagagcaaaactctgtctcaaaaaaaattaaaaataaaaataaaataaagcatctgtttactccttgactctctgtctcatccactagtgtattagggtaggagttctttgttcactgctgtattcccaaggctttgagcagggcctggcacccagtaggtggtgctccatgaatattgttgaatgaaaaatacatgaatgaatgagttatagacttttttcccctttagttacacaagagaagaaaaagatatctattgacagttacagctcaagagagtctttgctgctatgaaacagctggataaccacaggacactgaaagcactgtgccgagaacccaccggttcagcatctgaggatggatggatctcagactgcccagcagtagtgtactacatgggtgggtcagttgtaaagaagaaaaaactgatccatgagcagacactaaagaaaacagtgggatgaaatcaatactgggttaagtatggcagtctgtgagtttgaacatattgccccaatagattttgttttaactattttccagtagacattttttttcataatgctttcttttaatgcctcaactagtcgcaagagctttactaaatattgcaactcttggcggggcacggtggctcacgtcagtaatcccagcactttgggagaccaaggcaggcagattgcttgagctcaggagttccagaccagcctggacaatgtggaaaaaatcccatctctaaaaattaaaaataaaaaaaatacaccgggcatggtggtgcacacctgtaatcccagctacttgggaggctgaggtgggaggaccacttgactatgggaggtggaggctccagtgagccgtgatcatgccactgcactccagcctgggcaacagagcgagaccctatttcataaataaataaatatcgcacctctctttttttggtactaaggcagaactgtacatagactgatttctccaactttgagcaaccccagatggctctacttgaacagaaaagaaattgaaagtttaatcgtgtataatcccttgtaaacaacctgggggaaaaatggttaggttctcgccggtgatattttacttcaatgaggtcatgtagcacagtgaaaataacgaataactcagcattagggagaattgggatctgatcccatttttgccattggttacatgacacgcaagtttactcggctgctgcaggcttgtgtcctcatgcatgaaatggactaaacaatctccacattattaatgctttacgactccgctttccaaaaatggaaatgcatttgaagacaataccaggcccttgaaaatgaagacgggagggtaaaaaacaagctgcaacagagaacagtatcaagcttttaaagaaacaagttaacaccgaagccagaggcctttaatgtagacattaaacggtgtctacatacaccctttcagcttgaatgtcagcaccggctgtactgacagaagatttacatgaccttttcctgaaataagccttcctctcctagtaactcaataccacgggtacatttttccaggtacactagagttgggtactgctctagagctgcactgtccaatacagtagccacaagccacatggggctgttgagcacttgaaaatgtggccagttggaagtaagacgtactgcaagtgtaacatacatacaggaatttgaagacggtaaaaaaaaaaaggatataaaatattcagcattgatattgattgaaataatattttggatgcactggattaaatagaatatactattaaaattaactccacctgcttctttatgcatttgctaatacgactactagaaacattaagcttacataggtggcttgtattatatttctattggacggtgccattctagatatccgaatctacaaagtgactgagattcaaactcttcaatgaagcactttttaaatgctctacttgagaattaattccactcactgctctgctgccgtcgcggtcctgactttccaaggctgtgcccagagcgcggcacacgtggctctcacacaggcaggcctgcacggcacgcagcagtggaggaggttaccctgggtcgccgacgccaggggaagccaagcgaccgaccccacacttctgagccccgccggggaagtccccgggcgcggaaacaggtggtgcgccggcggttcgcagctgctgtgcccgctggcctgggcgcagccggggacagcgacgcgtttcctgcccgggaagggcccgagcgcagggccggctatagcggtcccgcagctgcctgcttcgattttagcactgctgctccctagagggagcaacgcggccctctgtccctcgtagggcttgaaatgtaaattattcatatcaggggaatgtgtgcttcaaaaagcaagctggacaagaaccgacgggtaatcctcgccaaattcttctatttaaccctcaccattaaaagtctgaggcctgaaaaatctcttgactggagagatattaactccacaggtaaacgggatcaggatctacgacataaatgaatcaaattcactgatttctaagattatttagacagtagaaaattattaatcctttttattagttcaatacttcattcagcatttgcagagcaaaatctgcttggatttatttagtgaaaattatcttctaaaactacaaagatttaaccacagtacataaaatttagttgcagtaggcaaattatatttttaagctgaaccctaagaaattgtccaaaaatatgtacaatagttatgcacagcacttatgattgctgaataaatgcatcatataaaatttagttcagtttttagcaagagtgaacgatttcttagatgatttttctcctggtctcatagtgcagagtattcacaaatggaccttatatcttctccagacaaccgtcatccccaatttattcacctaggcaaatcttagttcaaaagagtttgtgagaaaggctgacctacaggactaaaaccgtgcttacattgtaggaaaataaaagaaaatgtaatcgaatggacaataatttttaaagcacattattcaaggaggaataagccctgtaacagaatccataaaacaccatgctccatcagtctctttttgctaacagaatgaccaagtattctctccaattaattttaatagcaaaccaccatttcctaaaatgacttaaatgggttcaatcaagtaggagaatgaatccaagggaaaccactgactaggggtataaaatgtgccttacatcatattgcatacatcaaacaatcaaagaatttaggcttcaaattacaagaaaaaaaaatacctttaagtcttaccctcaaggtaagataggaaagtgggaaatgctgtctgctcactggcattccataaaatattcactgtaatttctggatttccaagacacatctatctagcagaggtggtttgtcaagtctgagcttttccacctgtccacccctgtagcaatggggctgatgttcacaacctgcagaccatcatcagcattcatggcaccccgacagataaccccattaaactctctccctgactcaggtaaacacttcacaatgtgagaaggtgagaaagacattattactgaaataaacctgaaagctgctctaagtctatagagaaagtgtaacactcacaaatataaataccattacacactatttgtaagatccctcataaatgactatgttatagctgagacctgcaacggaactcccaccaccaaatgttgtggtagtgtaaggaccattgttattttcacttgcaaatattcctgagaggtcgtattttaagctgctaaaaactaaaacaggaataaggtgacaaccagcaaaagaaaaaaaatgagctaatgcactcgagagagtaaggaaggctcacggaagaggagggctgtggtgatcagagtccacggacgtccaaaaatgtgacttggctggccctaacagaggggagcagctcttctaaaaacaaaatcaccccctggaaattatgttggttggttccttggggcatctacagttctttttcaagttatttacttgctcattaccgccagtcccagctttcttgggagacctaaacatatttggggaatggaaataatgtgcttgctgccacagaccaggccagtaagatgagaagataaagagtttctagagtttttattattcaaaatgagtttcatttcaattcaggtacttgaaagaaggttctagtctgttactttgacacagcacaagatcaatagtttattctgatgaagtattccacccaaatgaaagcataacatgcaagtagtcatttatttcaatcactcctatttgaaggtccttatttttggagaacagtcaggcattttattatccactctttccattccttaaaggcttccttccacgggtttcagtaaattcccattatcctcacgactgtgttctggagttgctccaggtgtgccagaagattcatcatcaatccacctcaccagtgcctggaaaagcattgaaagatgcgcacttcaacaaaccacagcaaaataccatcaggcaagagagaagcattggcttctagatcatagggtgacatattaccccatgaagacgctgcatttgataatgatgctgtgaatatgaataatgctaatgatatactgagtgaaatggcacgtaccaaatacacacagaattacaaatgatgtcaaaagtacgcactgaaaaaagatgaaaaagaaatacactcattcttatactttgtttctagcatgataggatattttttctcaacttgctgaatattctacaaggcattatattaatttgacatgtatgtatatacatatataagtgtccacacaggcatgggtagacatatgtatgtgaaaacacatgtgtagacatttctgtgcagtcacctgaatgcagtcatacccatgagtaaacacatgaatgtatattgatgtttgtgggcaagtgtgggcacacacacacatactgagattaggtactttccttcttcctttttaaagaaaatcacttttttcctcctaatgaacatcatacctctgtcccatatttggaaagataaatcctgtcctcacacttatagggtttaaaaaatgaactttgccacacatatcaatatttattcagttttgcaaagtcaagctctcttgccctaaatggaagagaagcagaaaatttcttccactatttctcattgaactgtaagcataaatcactctaaggcaagctgaagtttttaagaagggcatttcttcgcatgtttttaaaccacagcttcctgcttatctttacactaatttcctctgataaattataactctagagaaggatataatagatacatcagtttgctactcagataaccacttccccctctttacactatccatccctcaacttactttatatctttctacaatgctgaagccaataacagcacactgcaacttgtgcaaacagatagggcaaaggtttagagggcgccggtcagcttcttccaagtggaagaagccccagatttccctatcaaaatcctttgctgctatccaccatgccttgtcttgtaaaacttaatgggctggaggtcaaatacttgagaaactgaagtttcagagtcttttcccacaaaagaagtctttttctgaaagtagcaagtactccaaatcaagtactcaaaaaggaaccacaaaaactaatcacatgggtcaggcatggtggctcatgcctgcaatcccagcactttgggaggccaaggtgggcggatcacctgaggtcaggagttcaagaccagcctggctaacatggtgaaatcctgtctctacaaaaatacaaaaatttgccaggcatgatggtaggcgcctataatcccagctactcaggaggttgaggcaggaaaatggcttgaacccgggaggcggagttgcagtgagccgagatcccgccattgcactccagcctggcgacagagcgagactccatctcaataaataaataaataaataaacaaataaaataaaataaatcacatcaacaataggcagtcatgatttcactctttaaggacacgctaaacagatctgttacacgtgtgcctggaggggttgctggccttccctcacgcagcactgactgaggacaactgccctgatgtcttgaagcccatgctttaaaccacggctttagacagaataacctcgtccccttccccacccccaccccctttttaaagagcagctcaactctattctgtcactagtgtctggtgaccagaataaatacccttgtaactgacttcctgtgttacatttagagttatatcaaccatctctgcaagcacagagaacacggtttgctacgtaactcaccctacagggtactgcttcacaattcgacttgtttacatgatcacttttatttatgtctctcgttcagtttttattttaaagtaataaatttttaaagaaaataacccatggtaggtttgttcaatctaatttgattcaaaaacaacttcctcacctccctttacccagaaaatgtggactgatattcgaaaattagggaaaatagcattctagaagttaagaaaacactaaatctattcatgtatcacaagtaaccccctctggccaatcaagtgtgagcatatttcactacagtaatactttcagcaaggacatttctttcttccaataatcctacaaatagaagattattttctttcgtagtcaatgcttctcaatttaaaaatatgaatctttgtaaacttggagaaaacaagaccactgtgttaagatattgtcactgtctaatcctgccactttcctatgtaaatctttcatgtcatgtaatatttaagaaacttacaaaaaaaagaattaaagtaaaaacagtttggggaaatgtttcctgacctcctcaaatacataagataagttagctagtaatatctagataaacgaacatatggtttgaaaattatttttttagctgggtgtggtgactcacaccttttatcaaagcactttgggaggctgaggtgggaggctcgcttgagcccaggaattcaagatgagcttgagcaacacagggagatcccatctcgacaaaaaaaataaaataaaatagctgggtgtggtggtcctgtggtcccagctactcaggaggctgaggcgaggcaggaggatcccttcagcccaggaggctgaggttgcagtgacccatgatcagcctgggtgatagagggagaccctgtatcaaaagaaaaatgaaaggtagataaaattaatttttaatgtttccgtctctatcaggttaataataagagagaaaacttatgataaaaagctacctcacaccaccaaaatcagtaagagagtagtgacccacgtctccaagactgcatgttggtagggccatggggggccacaagtaaacctcacataaatggagaataaagaataaacgagtaagtgggaagaggctctatagccctacagcccccacctctagtagaaacatttgtcccaaaaagcttaccaccccacacaaatcctaaggctaatgtaacatccagacagaccataaactctcaggatagtccctgtacttactccccatccccagaacactaatgaaccactccccttagggggccttttccctttcaagtctgtcttggattattggggatgaagttagagaagtaagagcaaaaatgaaggggaggggagaagtagagagatgacaaaaaaaggttaaaaatataacctgtttcgtgaacctttcccatccccaatattaccatgcagagttcctaatgagtcaatgtttactatgtatctcaaatcaaagatggaagtttttactttttaaattaaaaaacaaacaaaaaacaaatgtcgtatgatgagaaagaagcaacacttagtctatggctatcctaactgtgcaagatgactatgaaaagaattgaaaaacaattagcaagattttcacatccattaatgatagctcaaactgtaattggcttaattcaccttgctactgaattactgacgtttactagctgttatgctgaatgcctatatatgtgccaggcctatatatgcttttttttttttgagacacggtctcaatttattgcccaggctggagtacagtggtgcgatcacggctcactgcagcctcaacctcctgggctcaagcaatcctctcgcctcagcctcctgcatagctaggactacaggtgtgtgccaccatgcccagctaatttagtttttttaatttttattttttgtagacatgtagtctcactatgttgtccaggcttatccacactttttatgtacaggcacttttatgtaaattatctccaaatgactccatgatgtgggtattgttacctttaaggtcctgtaggtagtgagtggccaaccagaacctagattatcacaatctaccaacagcacacttcccattatggcataatgtctcaactgaaaatactatagttttaaatatcaatatgattcttggttggaatttttttccctcttttaacatcttcaaatattctcaagttgaagaagcttctaacaacaatgccaaaaacggaataccatctgtcaaagaggcctgtccaaagacaaaattccacaagtctcttgggtaaagatcaatcattgttattcccacaacacagaaggcatcttcaggtttcttctttttcaagaacttcaggatgtcccctatttaagaagaaatacataaatgtatgagtgtatattatatacatatgcttcctttactcagttcaaattgcaaagttgtgtaattcacctgcatgaatttgtaggttttgtgtgttctcattgactctaaaggaacaccttgttgtagaaacaggaactggttctagcagttttactctcaagcgatagaaatatgctttacagtagcccgtgagccatttaatatattcttcactgataattctggtgcttcatagagatcctataatatggaagaacatttaaaaacagactttaagacgattattcagtgtttacccagtctatgagtaagaggattcaaattagaaacaaaaccaactctaaattttcaatacacctttaacattcatcggtgttgatatgaattaaaaaaaaatgttctaggtctgtttggctacaaaacttgtaccattgcaatgaatatcaaaaatgatcctaaaatggcccatctgaatcagaccaatagcccggactattcctgacaacagaaccattgcaaaaccgaaccaaaactagcacattaccagtatttaccaatggaccgtatataaatactgcgtttgtctggagagggtatctttctgtaaggatgactgaagaactgttcaaagtcttggggggcctcagggtgggaggtgatccaatctgatggagaatgcaaggtccaaagagatcactggctggctggaatgcttcattcattaaacgctgttccccagcatctactttctcatactgtgacacaagcactggattctttgagatgacagctatttttagtgtctgttcggaataccgtactatttgcatctaacaaaaaaatacaagcagtcaaatataaaaatacatatccatattggggactttacctattctccatatacagctctgatttctccctagagtgaaatgactgactgctaatgctttagagtggtcacacttagagtggtttcctcatgtccaatcaatttcttggggacctaagaaattacaaagacaatcatgaaatccattcctccatctcatatggaacctgctcccattacaaaaactagtggtggccaggcgtggtggctcatgcctgtaatttcagcactttgggataggaggactgcttgaggccaggagtttgagaacagcttgggcaacatggtgagaccctgtctctacaaaaaacttaaaaattccctgggcatagtggtgcacacctgtggtcctagctaccagggaggctgaggttgcagtgagccatgatcgtgccactgcactccagcctgggcaagagtccaaaacaaacaaaaaaatctcatggtgaccataggagcaggacctcacacccaatttccttcttttggggaataatattggcctggcatggtggctcatgcttataatcccagcactttgggaagccaaggcagaaggattacttgagcctaggagtttgagatcagcctgggcatcatggcaaaaccccatatctacaaaaaaattagccgggcatggtggtgtgcacttgtagtcccagctacttgggaggctaaggtgggaggatcatctgagcccaggaggtcgaggctgcagtgggctgtgatcgtgccactgcactccagcctgggcaacagagactttgtctcaaaaaatcatattatgaattaactcattagtgccacatgaaaaatactcctcgtttctagtgtgactcaaagatcttcaacatcaaataaaaacaaaactaatgtaagccctatcatttctgcaatttaactgcaggctgagaagctacggcttagtcacatcacattagggaagacatcagatgactaatcaaaagccagactcacaatgacaggtttcttccattcacatcgtgttcctatgtagagttttcatccttcctcttgaaaagggtcagatgttccaccacgagactttttgaattacacaaggaaaaacctgaacatctctgtctggatcatctctgtcatattttctaattatctagattttgccagtttaatgatagacaactgatgggaaaacttaagctaatgtctgttctgattgaacctctgaattctggggttgaagaggctggctgaaattccagatcaaatgtctctgtactcaaagctctgataagagcataagctcatcctcactcctacacaactgggctgaaatctgacttctacaggacaaaatataaaaccagatgtaccttccagtggtctacctaccttgattaggaaggaaggctcccatggaagcttttatctcacaaggacagacatgtctgggcctggccagaaggaagttgtggagtgtgccttcatctttatattaacgaaggcagtgagaaaagtcaggaggcctccccttgcctcccaagcctaatctagggaagctgcgggagaagatgggcagggggcgcacaatatggtcactgtggtgggctggaggcctgggacgctgtggtcccaaaaccagaacatctcgggccaaccgggagaagttggccaccctagctggttgcctacagcaactcgcactgtgggctctggtccgtgcaggcacaacccaggctccggctgggggtggagtagggcttccccggggactctcgcttcgcctcttcttcccccaggagcctctggaaaggcctccctggctccccagaggcactccgcccccgcagtccccgcggcttccgccacgtccgtccctcctacatcctcatccctctccaccgaccgcgactggcgcccgcctctacgacccggctgccccgcccagctctgacagcacctgcgaaccgccctgacccaacaggcctcgacaccactcacccgcgacatccctcacgcgcgtgcgcaccgcgtctcttcgcactacgccacgcccactggcgccacgccccttcgcgccgcgcgacgcgccgctccatcgcacacgctctctgggccccgccccactcacgacccgcccgcgccacgcccctgagcgcgccagagctggagttcggcggccgcggctcgccttttcctgagtagagggtcacgaggggactacaagccccagccgtccgcccccgcagtcgccagttccccgtctgccctcgccggggctccgcggcctggttctccagagccacagacgcgcccgcgtcaccagggtcgcccgtgtgggaacgtgctcggcaggccgcgggtttgagaggcgtcccggcgtgacgaatgcaaccagcgtagcccccaaatgagtcggcggccgccgcaggttgtcgtacagccgcggcgctccctggggcagtcacccaaaggactttcccttctttatttgttgggggcggcggggactggaacccagacgcgcaagtgtggggcgtgtcctcgtggcgtccctggcgctccgaggccgagacccggatgccaggagaggcagtgaggtcggaaaggcaccgcggggccagcattagggctgagctagttctgtggcctcgggtgggacgttcaatctctctgggcctcgccattctctttctttttattgctttttgtttgtttgtttaagacggagtctctctgtcgcccaggctagagtgcagtggcccaatctcggctcactgcaacgtttgcctcctgggttcaagcgattctcctgcctcaccctacccagtagctgggactacaggtgcccactatcacgtccggctaatttttgtatttttaatagagacggggtttcaccattttggccaggctggtctcgaactcctgacctcaggtgatccgcccgcctttccctcccaaagtgctggaattacaggcgtgagccaccgcgtccggcctcagttcttttgaagtcattttaccatcctctggattttcctcatcctaattctccttcccagtctccaggaaagacaggcacattttcttgatgacttcagcacttgtaaccccttgttggctctccttagaggacattaactctgtgtgtttgaacctttcaacttcgaggatctcctcagcccatccttatttgttcacccttctggatcatgaaatctccaaatttgtcttttgaacccagtgcccatatccaccctcacctgaacccattcttgaataaaatgcattcctaccatgactgttctcaaagtttgaagttgagcataccgatgcgccactcctgcttcaatgcttgagaagtcgtaggctttcttctatgtgccttttgactgggcgcctatctcccgacagcctgaggtggtgtagcataggggcgaaggtggtctgtgcttgaatcccaaaaccctcactagcgtgggacctgtgccagttacttgacctctttttcatttcttcactagtttgtaaaacggacacaattacagcacatcttttattgttattatttgacacgaagtctcactctgtcacccatgctggagtgcagtggcgtgatcttggctcactgcaacctctgcctcctgggttcaagcgattctcgtgcctcagtctcccgagtagctgggattacaggcacgcaccaccacgcccggctaatttttgtatttttagtagagacggggtttcaccatgctggccaggctggtctcaaactcctgacctcaggtgatccatctatctcggcctccgaaagtgcagggattacaggcatgagccaccgcgccccgcctacagcacatcttagcagaattttagggatcaaatgagttcctttggatactgtgcctgtttttgactgaacggctgtcttctgacatcctgagtggcttctttagcttagttgtcacctcttctatagcctcatcctgcctcatgacaaaacttctcttctgcctgttcattgccttgtgtgtacgtaataatactgcagttgtccttgtcacaatgattggaacctatttcttacatgtcacccttactcaactgcgagatgcttgagggtaaagactctcatacggggtgtctgaagcataaaaggtattcactagattttcagtcagttttttttttttttttttttttttttgttgttgttgttgttgttttgagacggaatctcactctgtcgcccaggctggagtgcagttgcgtatctgagctcactgcaagctccgcctcctgggttcaggccatttttctgcctcagcctcccgagtagctgggactaccagtgcccgcctccacgcccagctaatttttttttttttgtatttttagtagaggcggggtttcaccgtgttagccaggatggtctcgatctcctgacagttttttggtattcattaaaaagaacttcattttgcatttaaactgtttaaatttctgaatcgtgaactttgtacttgctcaaaaattttaggatagcatgtttctgcatggtctaatatttatttttttaaaaaaacttaccaggcgtggtgtctcatgcctatgatcccagcactttgggaagctaagacaggaggatcacttgagcctaggagttccagaccagcctggtcaacatagggggagaccccatctctagaaaaaaagccaggtgtagtgacacatgcctgtagtctcagctacttgggaggctgaagtgggaggatggattgagcctgggaggtcgaggctgcagtgaaccatgattcacagcactttagcctgggcaacagagtgagaccctgttcaaaaaagtaaataaataaacaccttagtgcttcaggggggttagtttttttttttttttttcattagaaggaaaagacactttctcttactaaggtatttttgcctgttaactaatatgcagttgcaaaatgaaccataggctgtttgcatttcaaagaacactacaagttctgatatttagaaatgagtgtatatgccagtggcccaaggttggaaaagaaagttggtaacaacattagaaggtggcagaaatcaggaaagaaatgtaacatatacggcagatgaagggtttaaaaatagcttttacatatcaacacggaaaaacaccatgacataaaaatgagcaaaaaatatgaaccatataatccgaatggttcattaacatccatgtgttcaactttattgaacacatgaatgaactcaaaggaaaaccactctaataatgttttcttacctgctaatttggccaaagtgtttattttgaaataatttcaagctaacagaaaagtggcaaaaatagtataaagaatccctgcattctcttcacccagattccccagtacttaacattttacctcatttctttatcattctctttctttctgtgtctttatctctgtctctctctatatgtaaatgtacattgtttccctgaactgtttgagagtaaattgcaggccgggggcgggtgcagtggctcacgcctgtaatcccagcactctgggaagctgaggtgggttgatcacttgaggtcaggagtttgagaccagccaggccaaaatggtgaaacccaatctctactaaaaatacaaaaattagcagggtgtggcgttacatgcctgtaatcccaactacttgggaggctgaggcaggagaatcgcttgaacccaggaggcggaggttgcagtgagctgagatcacgttattgcactccagcctgggcaacagagcaagactgtctccaaaaaaaagtaagttgcagacatgatgccctggactcctaaatacctcatagtatattcccaaaaatcaagcacattttcgtaagtagccacagtacaactaaaacatgagtccatactgacatttccaattccagtccagcctgacaccacagagttcattcattctagccttccatttttccatatgtatgatgtccttcatcagtagagagaaacctggctcctgttattcacaatttatttatttatttgctctgtactagaatatgtactaaaaataatttcagaattcctaatccatagcactgcaggaaaacaattctaccaattagtatgtatttaaggttctttatagccagaggatatatattaaaataactgtgttcaagttacctacctaggttagttccccctcccaattctgcccttcagtgtagtattgttattaacatgaaatatagttaggttcatttatttttgtttgcattccattttatgaatttccccccaaccttgatctttttttgattgtgtgatacattaacatggttactaaaaagttgtatttgatgataatgtccaatgatggtagactgtcctggcggagtgtataaacaggtcgaatctttctggtgaacaacctgacatggagtattaatagcttttaaaatgttcatacctattgacccaataagagatctcacagacttatggttaaggatagtcaacaaaatattatttataattatgaaaattagaaacaatcaaaatatccagctattggagactggaaaagcataaattattaatcatagaccataaattacatgtacattcatatgttagaatactaagcatctatttaaaatcatttctcagctgggcacagtggctcatgcctgtaatcccagcactttgggaggccaaaacaggctgatcacctgaggtcaggagttcaagaccagcctggctaacatggcgaaacccggtctctactaaaaatacaacaattagccaggtgtggtggcacatgcttgtagttccagctactcaggcggctgaagcaggagaatcgcttgaacctggcagaaagaggttgcagtgagccatggtcacaccactgcactccggcctgagcgacagagcgagactatctcaagaaaaaaaaaaatcatttctcaaagacagtagtgacctagagaaatgctaaggggaaataaagtgtgacacagaaatgtttacacgttgtaatttttttttttttttttttgggacggggccttactctgtcacccaggctggagtacagtagtgtgattacagctcactgcagcctggacgtctcaggatcaggtgattctcccacctcagcctcccaagtagctgggattataggtatgcaccattacacttggctaatgttttgtgttttttgtagagaaggggtttcaccatgttgcctaggcttgttttggttttgaacttctgggctcaagccatctgcatgcctccaccttccaaagtgctgggattacaggcatgagccatcttgcctggcctatatgttgtaatcttatttttgttttaaaaagatgtgcttggccgggcatggtggctcatgactgtaactccagaactttgggaagctgaggcaggcagatcatctgaggtcaggggttccagacctgcctggccaacaaggcgaaaccccatctctactaaaaaatacaaaaattagctgggcatggtagcacacgcctgaaatcccagctactcgggaggctgagccatgagaatcacttgaaccagggtggcggaggttgcagtgagccaagatcgtgccactgtactcactctgtgtccaaaaaaaaaaaaaaaagaaagtgctgataagtaataatctatgaataatgagatatttggtggttttgatttctctctctcctgctttacttgttaatttgccttttccaaactttctacaataagtattattacttttacagtcagaaagcaatttaacaagtcagtagtgtattaatatttaggcattcctaaatatacaaatgacccttgggcataacagcttctccatgttttctaggtggttctctgcctctgtctttctgcctaggctttcagctgctcctcaatctatttttctatggtctctgaattttacttacaccaacataccactaactagagattcatttagattaacaaccaagccatcctttgtcttcctaatttgttgactttattttaaaattactttatggaccgggtgcagtggctcacgcctgtaatctcagcactttgggaagccaaggcaagcggatcacttaggtcaggagttcgagaccagcctggccaatgtggcaaaaccccgtctctgctaaaaaaaaaaaaaaaaaaaaaccacacagaagattagccaagtgtgccaagtgtggtggcacacacctgtagtcccagctacttgggaggctgaggcaggagaatcgcttgaacctgggaggcagaggttgcagtgacctgagatcacaccactgcatttcagcttggataatagagcaacacttggtctcaaaaaataaataaataataaaattactatatatatgaaaatattccaaatatacatttttaaaagctaagaagtactaaaagcattgtaatgaaaagtaatagtccccaccccataggccaacttcctagaggctactgttctcaactccttggctgttttttctggtatttatctccatgtttctcaacaatgtgtgtatagtgagatttcttgatcttttgattttaggtagcatctgttaatttattgccatgagagatgaggacttaactctcatacatcatactttctacctctcattcctctggtgattatatcacacattttggttgaatctggtggtcagtgtttacattatgatgattatgcaaacattgtgtactacagagccaagtagtgtactatgaccatgctttctttcttgtagaacctctttatttttgcctagagttaatcatcacttgatttctattatttattttcttttaaaaaactatataacatgcatgtgccttattttttatgattctctgattctttactttgttttttaatgcttctctacatggcccgtttacactagttacattttttttctgggtaccctcatctccacattcctatctatactggtcatccatgggcctactgcatagctgttcctaggactgcaactacactttgctctgttggatcccctgtttcttaaattactaaattctgtcttcctctttcctggcctactcctttggtttcagtagcacatccccagaaccttctggaataaaggtacatagagataaatattttgagaactttgacatctgaaaatgtttttatcctgccctcatacttgattgagaatttattgagttggtgtggaattctagattgcaaatcatttcccctcagaattataaacagtttgctccagtttcttctgacttccaatgttgctactgagatgttcaatgccattttgattcctagttctttgtatgttatctgttatttttaggaagattatagggtctcctttttatccttagcgttctgaagggttataaagatgtgccttagcctgaacctttcttctcattcattttgtggctcacttagcaggccctttgatactgagactcttatcctttcattctgagaaattttctggtattatttttttgataatttccttccctccattcttgctggatgttggactttcagaatagatcctcaaattttcttatctctcacattttttccatctttttgtactacattctgaagtttttatcaattattttttttctttttcttttcttttcttttttttttgagacagagtttcgctctgttgcccaggctggagtgcagtggtgcgatctcaactcactgcaacctccacctcttggtttcaaccagttctctgcctcagcctccctagtagctgggattacagacacccaccaccacacccagctaattttttttttttttgtatttttagtagagatggggtttcatcatcttggccaggctgatcttgaactcctgacctcgtgatccacccatctcggcctcccaaagtgctgggattataggtgtgagccactgtgcccagactttataaattatcttctatcttttcttttgaatacttactttaaactattctgcttttcaatagccaaaatccctttcttgttatgattattttattttgcaccctgcgatggtttgaatgtctgtgtccccccaaatttctatgttgagacctaacccccaacgtgatagtatttgtagatgggaacctttgggaggtgatcaggccatgagaatggaacccttatgaatagtattagtgcctttataaaagagacccaagggagtcagctcaccccttcctccacgtgaggccactgcaagaagacactatctctgaaccagaaagcaggccctccccagacaccaaatcagcaccttgatcttggattccagtccctagaaccatgagaaataaatttctttgtttataaaccacccagtgtatcatattttgttacggcatcctgaaagtctaaaatacatcctatttcatggataaaatgccttttcttatttctctatagatagtaactatactacttttgaagatttgttctgttgtttcctctgttttggtctttttgtttcatgttagaactttccataaacatctggtaatctttggctatctgttaagatttcattatgaggcacaaaaaactggtggggggttctgtgtgcatgaatgtggcttattctcagaggcaatctggcagataatcagcttattcactgaggggattctccccagtgtctgaacttgaaagtttcttctctgcgaccattgcattttttttccagagtaggatcatttcctaactgactgccagtgttctggaagcaggtgcagtgaagagcctaagagtcctactaatgtgtgtgtgaattccgaatccttagtcaccgtgttcatccctaacccatactgccacaaggactctcaagtctcacaactaattcattttaacatgagaagatattaagagggttaagaggttctccatgattcacctactagtgtgaattcatatcttctccttttgcttttcccctggcccttagctgatatcaactgctctgaggaaatggaagtctgattggtcaggaagcaggaatagtgggtaatttggggtcccagaccccccttagcaggcaagcagcccagaggtgggtaaagcactttaggaaagggtgctgcaatccagggactacggccctggacctggacgccaaaagggagttgagaaagtagaaaagaaaactacttatgcttaaattgtgctcagagccaggtctctatgcaaaggagcagcaggtgacctgatttctccctcctgcactgcagagaacctgccctcaaagacccagagctcagcttcagtagaagttgaacagcactgtgcgagcgaacctgagaacccagtcaccctgagaaaaacggtttctaggagaaaacacattctttgatccaaacaaccaacttacaaatgatcttttggaccacgtcctgcctgcaaactgaggctcaattcacctttaatgggccagctctggcagtgccaagggagagaggccattagcagaaatgaaaaaagcaagaaatcttttagtccattaggttaaaagaagatttttcatgctttattatttatgatttgcgacttcagttactgtttcctggaacaaatgttatgattcaacttctatttactgaagcaaatagatgcttatcagcagtcatgctacaaatcacaaagcagtcagtaaggcctttggggctgtggcctcttttgcaattctttgatgtcttgtcaggcaacttattttctgtgccttagagagtttccaaaagctaccacaatctgatgtgtgtgtgtgtgtgtgtgtgtgtgtgtatacatttgtgtgtgtatatctacatgcactctttctgtctctctttctctctctctctatatatggcatataaatacagtaaattcaaagaattgagcaaaagcagattttggtttttactttaagaatatcatttcacttcctgaaaaattaggaattaggagtcctaagaataccacatagcatttaggaagacttgagtgggagctaagaaagttcgaatgaggggaggaagaaagtccctggtcagcccggtatagtgactcaagcctgtaaacccagcactttagaaggctgaggtgggaggattgtttgagctcaggagtttgagatcagcctgggcaacctagcaagactctgatctctattaaaaaaaagaaagaaaagaaagcctgggcagtggcctcagtgaaccctcgaggatgctgtgatcctcttggtgacgtccccagcctctgcttcaggatgacagcatggtctcctgcaccatagctcggtctgaaattttcggtttttctttcaagttcccctttttcagtcttcaagggggatggaggaggtggcctgaataagacataaatgaaagaggaagtgtctcagcaccaaccaaacgtaaaacagcgacagcgacccacttagcttgtgacctctacggaaatactgaagacgtcctctgtgtccttttagactttctgggggaggggacagctgctgcccagaagcaagcagcttccttttggccaggtcagtgcagggaaccaacaaagacagggacctgtggccagaagaagcacagccacagcaggtatctgattggactgagccaggaaaggccttcttgcccttagggacccctcaaagcttctttcccacaagctggaaactgcttggctcactgctgtcctaaatgcaggtgccagccgagggggttaccctaggaccgtgagccattaacagcttgtctcaaatacgcttctccaaggcagtcagcgactccccactgaacacctgtgggttcctgctggtgctaacttaggcacagggctagcaggtccctcccctgtagcagatgatgagagcaagtgtggtgcaggaggaactggaaagagagcatcgtcagaggcgacacttgcgtggattaaaaccatatattcttgtgcaatgtaaaattgccaacttgcatcagcataacgaaggacacacttagaatagaaaagctgaggaggacagaagaataggaagaacaacaaaatcatgcctggtccttttgcccagaaatgacccatgtgaatcttggctgaacttttagactttttcgcggtgcacatttctgaacataatttgacaacgtgggacctctagaattgtacattctaatttttcagtccatttatttcttattccagaaagaatccatatataaggatggctcatcacagtgttgtttttaattgtgaaaagctgaaaaatggatgctcgccactagtgtttataaataaattcaataaagttatgctctcacaataaaatattatgtaatcatttaaaagaataatctcatgctctgcgtattatcatggaaggatgtccacaaggtcttgctgaaatttttttaaaagtcccaaaacagtgtatatataatttgagactattgatataaaaatatgggtgtatatgtgtgtaaaaaaagatgtttgggccgggcacggtggctcacgcctgtaatcccaacctttttggggctgaggtgggcggatcacttgaggtcaggagtttgagaccagcctggccaacatggtgaaactccgtctctactaaaataaaaataaaaaaaattagctggatgtggtggtgcatgcctgtaatcccagctactccagaggctgaggcaggaaaatcgcttgagccagggaggcggaggttgcagtgagccgagatctcaccactgcactccagcctgggtgacagagcgagactccatctcaaaaaaaaaaaaaaaaggatgtttgccaaaatgttaataatggttgtctttagaaggagggctttttgtgctgtttactttcttcttgatattttttagcaatttgtttttgcaatgagcatttactagttttatattttttaaactatttaccttgaaaaaattaggtaaatctatacttaccatataaaatacatttattttgtagtgagtgaaaatgagggttacaaaatatatacatagtataatatcatgttcatattttatagttttatacataaatttacatattttagtttaagtgtttataaatacaaaaatacattcacacatttgaacatatatataatatgcatatacattttacatgtatatataaaaagttttaaaacatatatttttattttttaagattactctttttttcttttttttttttgagacagagtctcacactgtcgcccaggctggagtagagtggcacgatcttggctcactgcaacctccacctcccggcttcaagcgattctctcgcctcagcttcccaagtagctgaggttacaggcgcccaccaccacgcccagctaattttttgtatttttagtagggacgaggtttcactacattggccaagctggtctcaaactcctgacctcgtgatccacctgcctcagcctcccaaagtgttgggattacaggcgtgagccactgtgcctggccaagattactcttatattttgaataataattgtatttccattctggggaaaagagtaatattttggaaaccaggcgcagtggctcacgcctgtaatcccagcactttaggaggccgaggcggatggatcatctgaggtcaggagttcgagaccaccctggccaacatagcaaaaccgtgtctctactaaaaatacaaaaatcagccaggcatggtggcgggcacctataatcccagctactcgggagtctgaggcaggataatttcttgaacctgggaggtggaggttgtagtgagccgagattgtgccactgcattccagcctggtggaccgagtgagaccctatctcaaaaaaaaaaaaaaaaagtatgattttgggctaagtcttggaggggtagggacggccagtccagggcagcccaggctgagggcacagcatgtaccaaaaacacaaagccacagcagagcagggccatgcgtggcacacgctgctcctggcacctgatagcaccagtgttctgtcctcctggaaactctcctcttgcatttctgggtcactgttctctccaggctgcccagtcagccaagcaggcacctgggcacagaggggccctgagggattgaggctgtcccgggtaggggctccgtaagggggaagccaacctactttgcagtgttcctgaggctcaggcccgtgtgccacagtgagagggcgcgaactccacggtccgtggacttgggttcagctgaggcaccaccagctcctgggtggcactcggccaaggcactttacctccctgggactcagtgtgtttatccaggggtatgaacaataagaacctctggcccacaggcttaatgagagaattaaataagacatgggaacagctcctttcaactaactgtttattaccagaaggtgcccaataaccaggcatggcaaaagcccaaaggcaaaaacacaaagccctgacatttaacaggttctttttttgctaagaaaccagcgctggagacaagtacttgtgatatatcctcgtggctggacttgttggtcacaagttctaattatggaaatgccctctgacaaaagagcctgttgatgtgagtcactatgggtggtttaactctctaggcctgggctgctcctaagaatcatttgcagatacatctatctacctagctatttttttttttttgagacagggtctcactctgtcacccactcttcactctgtgaagtgcagtggcacaatcagggctcactttatccttgacctcctgggctcaagcattctttccacctcagccctctgagcagctaagactataggtgtgtgccaccatgccgagctaatttttttattcttgttttgaattgtagtatagatgtctcactatattatccaggctggccttgaattcctgagctcaagcagtcctcccacctcggcctcccaaagtgctgggattacaggcatgagccaccgcacccggcccataagatacatatgttttttttaaaataatgcagtgagttgttttgttttggtttttgtgtttttttagagacaaggtgacattctgttgcccaggctgtgctctcacagctcactgccgccttgacctcctgggttcaggcaatcctttcaccccagcctccacgtagctgggactacaggcatatgccaccacaccctggttaatcttaatttttttttttagagatggagtcttgctatgttgcccagtctggtcttgagttcctggactccagtgatccacccccctcagcctcccaaagtgcaccaccatgcccagttaattttgtatttttagtagagacagggtttttccatgtggtcaggctggtctcaaactcctgacctcaggtgatctgcctaccttggcctcccaaagtgctgggattacaagtgtgagccactgagcctggtcgctacttgttcttattgtgcatttatatcctgaagaaatggaatctgccatttgctgtagcagcgatccagaaaaacaaagtgtagttgttggaataaaacacaactaactgacattgagtgtcacctgggggtgacccagcacagcaagaatggatcagcttaagcaggtgtggtggcatgcacctgtggtcccagctacttaggaggctgaagtgggaggatcacctggcccaggagaacgaggctgcggtaagccaagatcatgccactgcactccagcctgggcaacagagcaagatcctgtctcaaaaaaaaaaaaaaagaatcaaagaatggatcagcctcatatcatccaagctcatagagacaatgatgtagaaaaaccccaatggctttgtattgaatcgtcaccttcagagggctggggacataggttcatagatagtaccttcactcccgggaggcacgggaagacaattcctttttggtttttttttgagacagagtttcactcttgccacccaggctggagtgcagtggtgcagtctcagctcactgcaacctctgcctcctgggttcaagtgcttctcctgccttagcctcccaagtagctagcattataagtgcccatcaccacacccagttaatttctgtatttttagtagagacggggtttctccatgttggccagggtggtctcgaactcctgacctcaggtgatccacccacgttggcctcccgaagtgctgggattacaggcatgagccaccacgcccggccgggaagccaatttataacaagctttcttggtaaacatgggtaattagttgatgaccctaatggtccctacccctcaaagtttggtgcatcctctttctctctcccagccgtgtgaggacacaacatgaagttggtcatctcaggaccaggaagagagccctccccagaacccaactatacttgcacttgactttggacttcctagcctctgctgtgagtgatgaatgcttgttgtgtaatccacccagcctatgatactctgtggtagcagcccaagctgactaagacacttggcaagtgcatctccacaataagatccaagccatctcagcctggaagttgatgcttccagatggcattcaggagaatgaccaaagtttgtctctcttttttttgagacagagtcttgctctggctggagtgcaatggtgcgatctcagctcactgcaacctccgctccctgggttcaataaatttcttgtgcctcagcctcccgagtagctgggattacaggcatgtgccaccacacccagctaatttttgtgtttttagtagagatggggtttctccatgttggccaggctggtctcaaactcctggcttcaagcgatccacccacctcagcctcccaaagtgctgggattataggcatgaaccaccacaccgagcccaaagtttttctctttgacccttcattttgtattgttgatcaatctcctcacctttttttttttttttgagatagggtcttgctctgtcacccaggctcaagtgcagtggcatgatcacagcttattgtagcctcaaagtcccaaactcaagcaatcctcctgctttagcctcctgagtagctgggactacagacgtaggccaccacacccagataatttttatttttttgtagagatggggtctcattatgttgcccaggctgctctcatactcctgggctcaagtgatcctccaaccttggcctctcaaagcactgggattataggcgtgagacatcacgcccggccctaaccccctttctgattgacatgttcttaaggtaccttacaagaggttagaagtgtttttataaatataccttttttttttttttttttacaaacttcagttgtaaccaaatcttgctaaagaactcattctgatctcttaaggtaactttacatttctttacattagaactttatatttcttctaatccatatgcattggttttacagttttaccgttttgtaattgccaaaacaatacaggattctcagtcacatcggaatttcagatgaacaatgagtaattttttagtataagcatgtcccataaatttcatgggatatatttacattaaaagtgattggttgttcatttgaaattctagttaactaagcaccctgtatttttatttgtaaaacctggccacccactctccaagggaaatactagttccctatttccaaattggtggaggtggtggtgacctcatgattgctcatataacctatccacagtttcaagaaggaaagaaaggtaattctgtatgccaaaaagacacaaaccacacaaatagcaaatatgtccccatgcaaggcacagtgctggatgactcatggagagtgatgtctggtcaaacacaagccctcgggcacgatggctcatgcctgttatcccagcactttgggaggctgaggcaggtggatcacgtgagcccaggaatttgagaccaacctggacaacatgggagaaacccctctctactaaaaaaaatacaagaaaactagccaagcatagtggcacattcctcagggcgggaggctgaggtgggaggatcacttgagcccaggagccaggagatccaggctgcagtgagccatggtcacaccactgcactccagcctggacgacaaagtgagacccagtctcaaaaaaaaattaaaattaaaaaataataaaacaaaaatgtaaaaaaaatacatatatatgttgctctacagattagatgcattcagagaaatttacctgaaaatcaatttctgaaaagtaaatttatttccctagttttcaacaaaaaataagcatactaggctttcaacctcaatctgccaatttatcatttggtccttggcaagtgtataaactaaaaacttcattgagactcagctttctcatctgtcaaacatagcccaaatggctacctttccctccagccaatgccagaggaagtgcttggtgaggaaggggtaaggagcatgacaggccctccaagatggccccatggcgtctgtgatctccctgttcccttctcaataaaatgaatgtagatcaagcaactcctaggtgtgagccattctgaaaggggctgtgggatagaacacatccctgcatcccttgaagagttagactccacctggaaagataggacatgtgtagtcatctgttacagtggtagcccccagtgaaatgcacctcttagtattcatgccctctatagatcactcaactgaatctgggctgcctgaaacaatagaatgtgacagaggtgatactgtgccagctgtgccaaggggcacacgtggaggggctcacttcagggtgctggatgaagaacagggcaggaggccagacacagtagctcacgcctgtaatcccagcactgtgggaggccgaggcgggtggatcacctggggtcaggagtttgagaccagcctggccaacatctctattaaaaatacaaaaattagccacgcatggtggtgggcacccataatcccagctactcgggaggctgaggcaggagaaccccttgaacccaggaggtggaggttgcagtgagccgaggtcgcaccactgcactccagcctggacaacaagagtgagactccatcccaaaaaacaaaacaaaacaaaacaaaaaaacaggacagggacagatgctgggctttgaagactgcacaagctctagggctacgccttaggaaatcttggtggattccacatttgtagtcctgggaaccctgagccaccaggtaacaagccttaccttcctgttggagaggccacatggagagtgagaggccctgagactatatggaggagaatgagaagctcagccagacatgtgcacatgttcaagctgacccagccaccctccggactccggagctacaacagccgggacccctgacatgggggtgatgaagccacatcttcaactcattcttgggtgtgcaagatgcaagttaacatggaactcattcttgggtatgcaaaagatcaggaatgtttaagcaaagcaaatgatgtctaggtgaaggtgatgctccccagacagggaacagcacccagtatcccctgtttaaattccagacccacagatttgtgggcaaatagcattttggttgtttttatggtacctcgcttttgggtagtctgttatgtagccataggtaataaaatgtcaaactctcaggaaaagtaaaatgtccctcaaaatgttaggaatctgtgccttccagccagacaagtttctcagggtcgaaagcaaggacatgcccagttctaacacaggcaggaacacttcctgttggggactgagcaggaactccctgtgagtgccccaggtttctggatcctgggggggtgtggggacaggcacctgggctgaggggctcgcctgtgtctgttcagccacggctgtgcttccccagagacgaaacatcatggggggctgcgtttgaggtgggggtgtcagtgccacggaatcagggctacctctactgtgcagagcaccgtgacgtcccctaccttccaggcaacagcaaaaaccaaaagagacaggcggtagcaaaaagggagggtggagtggagggagagagggatagaggccaaaaaacaccccatgagacagcaagggagctgccaagccttcatttaacccaggacagaagcaggactcgccacccggccacggaggccagagggctgcagaagggcacacatgcggaggggctgacttcagggcactggatggagtacagggcagggacagacgctgggcattgaagacagcacaagctctgacggggccaggaggggccaggatactacacacacagggccagcaggccagcacacgcggaagcagcagtgcaggtgtcccgctgtggatgtaggctgcttggggcagtggtgggtcgctgtagcgggcaggaggagcaggtggaaatgtgaatgccaggccaaggcagcatatgggccaggctgattgaaggctgggcctatgcctggttcatcttgggctccccagcccctagcacataaaaatagatgctcaataaatgcttgccaacagatggactttgcttctaggtcactgggaaacactgaagctaactccacaggggtgacccaaatgaaagcagtgaaaggaatgctggagtggccagagtggctggctggagaaggcccatgaggcttccgcagcctcccgaggaggggaggcaagggcagggctgaggaagggacagaaggatggagacagcctcgtcctcaggaagcattttgccgatggtcagtcagggtaggagtggatcccaggggcctgggctatggtccagtctcgccatgaaatcaccatgtgaccccagcaagtcactccctatctctagggctcagctccatctctgtgcatcagaggagtcagatgagaagtttcccttttggtcagactgtgatgctgagatttggtgactgatgtaaggcgtaggtggggtggcgtcaggaaagggaaggagcaccaagggtcaaagatagttctggggaagatggtggagaaaatgatgtggctgtgggaagaaataggaagtctcaggatggggagctgagctcgggcaggaaagatgatgcgtgggcagctaggggagcttggtggagacgagggcccaactccacagcaaacgggcagtggaggcaaaaaggacagccggcttgaacatgcctcctgcagctgggtgtgataggtgaaaatgtctccctccccaaaatatatccacaccctgatccccagaacctgtgaatacaagggtctttgcagatgtgattaagtaagggtcttgacatggaagcagattatcctggattacatggatgggccctaaatacagttgttttctttttattttgtagagacggggtcttactatgttgcccagcataatcttcaattcctggcccaagtgatcctcccacctctgcctcccaaagcactgggattacaggtgtgagccactgcatctggccaatgcaggtatctctgtaagagggagacagagggacattagacacaccgaggagaaggccgtgtgaagatggagcagagagagatttgaagatgctgaccttgaagactggagcgatgcagccacgagccaaggaatgcggctggccaccagaagctggaagagaccaggaacagattctcccctggagcccgcagccagtgcacagctgagcagtatggagtttagacttctggcctctagaactgtgagagagtagatttctgttgtgttaagctaccaaggattgtggtaatgccagcagtcactggaagtgcatacactggccatcccacaaatcccaggctctgaactcacagccaggtccctacccgggctcctggttaagtgctttgcatgtgttgcctcttactcctccaataagctggtggggaggacctattaatatccccacttcccagaggaggaaaaccaggtgtcgagaggtcagatcatcttcccgaggtcacggagcaggtctgtgacaaaggctgattcttgctgagatgggtgtgacaccagtgggaacacttcaccattctgccactctgtccccagctatgaacatagattcctaaaaatgttattatgtacacaagtgttcgagttctggtaaaggaattagggcctccctctctcggtgcccgaagccatagaagttattatgtataacaacagcagttcaaaatcccaactcagccacggggtgatggcaggttagcttgtgctcctccctcctaaccctgctgtgccacagggcagcaaactgggaccctaagaagtggcggcttgctccaagtcttaaggctggtcccctgatgtgagagccagaatcagaagccagttcagaatttccccacccagcacacagagtacattttaggggtaaattaggcagctgaaatgtgaaaagaaatggggacttggtcacatgatccttgctattgaagacagtcccaagaccactgtccagaattaaactctaaaatcaaatgtattttccaaacacatgcatgatgcctgccctccaccagaggtgggaggtggccaggcaagccagactgggtgccacctaggtcactggagatcaggggaggacacttgaccagaataggtccactggctgatgggtggcccatgaggacttcctccgatggggcaaagtattgaatccatcagactggctccctgcagtgggctggacaatttgtagaggactggacaacagagaaagagacaaagggttaaggggcagaagggaagaccctgtcgccagagcagccttgcatcctggcagctttccctcctcactcttcatcttgaaggaagcctccctgggttctccattctaactactttagagtcagcctctcgcataactcttaaggcacaaaacagagtcaaatgtacacagtaggcaggtcttctcccagtccttttgcttggcatctttgcgttcagattcctgcagttttgactcctttgtgaagtgatacacttacgaatgccttactgaattaattttgctgcctgtcactctagcaaatccacttcgggccagtcggatttgccagggtttgttctcctccttacgggtccaggagggctcccgggcgagccagcttcaggcggagaccacagcacgtctcccttttcatactccaaaagccaaaagaagatgggcttggggtgaggcaatctgggaccccattttctttctattaatcttgcctgaatttacgtgttgaaaaatgaacgttaaggccgggcacagtggctcatgctgtaatcccagcactttgggaggccaaggtgggcggatcacttgaggccaggagttcaagacctgcctggccagcatggcgaaatttcatctctcctaaaaaaatacaaaaatgagctgggcatggtggcgggcacctgtaatcccagctactcgggaggctgaagcttggacctgggaggcggaggttgcagtgagccaagatcacaccactgcactccagactgggcaacagagtgagactctgtccccccaccccaaaaaaagagaaaagtaaagaatgttaaaacactcaccactgagggatgtttactatatgcctgaacacaatgctaactttaaaaaacagctattgctctttggctcgagtcacagacggaagaagaaaaaaaattaaaatacacggctattgtgtgttttcctatagtaaaaatagaggagagctgaattctgttgggcatggagttaataataatttacacctgtgatgctcagccaaccacacagttggggtgcttgtgaattttacttacagatcctattaatataaggctgaacttctccatttccaccctcccacttcaaccaccatcaacacgactcctctctcaggggacttttagctccactatcactgcagggtggcaaaggtgatgctacagcccaacaatttcacacatttgtttccagtttattttattttattatttttttttgagacagagtgtctcccttcacccaggctggagtgcagtggctccatcctggctcactgcaacctccgcctcccgagttcaagcgattctcctgcctcagcctcctgagtagccgggattacaggtgcaaaccagcatgcccggctaatttttgtatttttttttttttttagtagaaacggggtttcaccatattagccaagctggtcttgaactcccaacttcagttgatccacccgcctcggcctcccaaagtgtcatgtgtgagtcaccatgcccagcctggtttccagtttctttgggggaaaattgccaaggcaaaacccaaatgaaacgaagaggatgatagagaaagaggaaagaaggaaggcaaagcaaagggagtgaagaagtagataaaaataaaaatagctgcccctcagcctgggcaacataggaagacccccactctaagaaaattttaaaaaattaaccagatgttgtcacaagcacctgtagtcctaactcctcgggaggctgagactggaagattatttgagcccaggaggctgcagtgagctatgactgcaccagtgtacaccagcctgggcaacagagtgagaccctgtctctaggaaaaagaaaaaacagctacccccaattcctatcccatgcctggcactgcagcactttctgcatttgatgttaaactgaacctgccgcataggtgttataggtaaggcaagcgacacgcagaggggctggcatttgcctaaggccacacagctcaggaaacacagaagcctggatttgaatccaagtccatcttatgttaaagcccatgttcttgcttactgatcacagaagcaccctactctcattccttaaagaatcttacaaaacgaaagaaaaaagcagcacagcaattctctagaaaatccattagcgggcacggtggctcatgcctgtaatcccagcacttcgggtggctgaggctggtggatcacctgaggtcaggagttcgagaccagcctggccaacatggcaaaaccccatctctactaaaaatagagaaattaccagcctggccaacacggcaaaaccccgtctctactaaaaatagaggaattaccagcctggccaacatggtccagtctggccaacataatgaaacttcatctctactaaaaatacaaaaattagctgggcgtggtggcacacgcctgtaatcccagctactcaggaggccaaggcaggagaaccgcttgaacccgggaggcggaagctgcagtgagctgagattgcgccactgcactccagcctgggtgacagagcgagactccatctcaaaacaaacaaaaatttagctgggcatggtggtgggcacctgtaatcccagctacttgggaggccaaggcaggagaatcacttgaacccgagaggcagaggttgcagtgagctgagatcatgccactgcactgcagcctgggcaacaagagtgaaactccatctcaaaaaaaagaaaaaaagaaaagaaaatccattagttagagttgaaagcttgagtgagaaaatgtagtgagttatgtcttatgctggaatagcagtttggatctcttgtattgttgagcaaaaaggccattaaagaaatggagcacagtaaggctggcaagaaagcgctgccccgcagggcttcattataatgaggccacgaggggcttctggctgagatgaaagatcttgatgtcatggatccagcataactcagtccttcttgccttctggtgtggaccctactcaagcccaggctttgaaactgattatgtttacaacatttccccaatgagggtatgatctctttattctttctgactttttatgatgagaagtttcaaacatacacaaaatttgaaagaagagaatcaggaacacctaagaacagaataatggacaattaatatcttaccacttgctttatttctctgtctctgtctctctctcttcctcgatttcctccttggcttccttgatacccctccctccgagagcacacgcctttctgatgctcctacttggacagttctctgtcctcctcttgaagccaaggtttcctgctagcccacttctctcctgactctaggcagtcagtcccctaggacaggggtccccaacctctgggccacagaccagtattggtccatggtttgttaggaactgggccacacaagcaggaggtgagcagtgggtgaatgagggaagcttcctctgaatttacaggcgctccccattgctcgcattaccgtgagctccgcctcctgtcagatcagcggtggcattagattttcataggagcgcaaaccctattgtgaactgtgcatttgaggaatcgagattgagcactccatattagaatctaatgctcgatgatccgtcactgtctcccatcaaccccagatgggactatctagttgcaggaaaacaaactcactgctcccactgattctacattatggtgagttgtataattatttcattatatattacagtgcaataataatagaaataaagtgcacaataaatgtaacatgctttaatcatcccaaacccactatccccacttggtccgtggaaaaattgtcttccacaaaaccggtccctggtgccaaaaaggttggggaccactgccctagaaccatctccctacaacccacagcttcagccactgtgcttgtagcttacattctgcacttttatcaatcagacctctccactgagcttgagacctgtagatccagctgcagttagatgccccaaagggacctcagactcagcatgtccctcagagcctacctggcccacccaagtctgtttcttcccccagacgtcctatttcaggaatggctccatccagttgctccaccagaaacctgggcagcctgctgggtttcaccctcttccctccacctgctgcttccaagtgctctgtccagttttctgcctgaagtatccttttcattcacctccttccaattccattgctaatgtataagctcaggtatcttgcttttcctgtacctcagcagccctcacttcagttcttgcctccggccagttgtcaccctcactgggattactgtaataccgctgaggtcatgtcgttctgcctcttgtttttctttttctttttctttttttttttgagatggagtcttactctgtcacctagtctggagtgtcgtggtgcgaactcagctcattgcaaccacctcccaggttcaaacgattctcctgcctcagcctccttagtagctgggattacaggagtgtgccatgcccggctaatttttttttttttttttgacagagtcttgctctgatgcccaggctggagtgcagtggcgtgatttcagctcactgcaacctccgcctctcaggttcaagtgattctctcaccccagcctcccaagtagctgggattacaggcatgcgccaccatgcctggctaatttttgtatttttagtagagatggggtttcactgtgttggccaggctggtcttgaactcctgacctcaagtgatctgcctgccttggcctcccaaagtgctgggatgacagacgtgagccattgcactcggccccattccacttcttataatgcttactggtttttcatgcccatgggataaaagccaacggtgttgatctggcacgtgaggacctccatgacatgttcactgctcatttactcagctttacctcttgctactcatccaccacctttctatcttccaactggttagggttcttgctgctacccaacttgtaagccccacacacctcagtgccttcgcacatgcggtaccctctgtctaggactcccttccatacctgtgtctgactcatcttttatcatagtctttcatatttttgttccccttactaaacagtgaacttttgggggtggggatcagggaactgtttctcctccttaccctcatcaccttacagaaggctatcagtgaaaggtgctcgatcaaagctagataatgaaagaactcccggctttcttactgacacaatgttccaccatctggcatgcagcctttcctgcgtgttaggtctaggtaaatttaagacatctttaaagccccagcccaaacaccttctcttccacaaaagtatccctgccaggctgggcaacacagtgagaccctgactctacaaaaaaaaaataataataataattgggcacagtggcacgcacctgtggtcctagctacttgggaggctgaggcaggaacatcacttgagcccaggaggtcaagactgcagcgaattgtgatcctgcttctgcaatccaccctgggtgacagagcgagactgtgcctcaaaaaaaaagaagaaaaaaaaaaaaaggctgggcacagtggctcatgcttgtaatcctaacactttgtggggctgaggtgggtggatctcctaaggtcaggagttcaagaccagcctggccaacatggtgaaaccctgtgtctactaaaaatacaaaaaattagctgggtgtggtagcgggtgcctgtaatcccagctactcgggaggctgaggcaggagaatcgtttgaacccaggaggcggaggttgcagtgagccaagattgcgccactgcactccagcctgggtgacagagtgaaactccatctcaaaaaaaaaaaaaaaaaaaagaaaaagaaaaaagtgtccctgattgcacgtagatggaaggaattgcctttctctgaaggcttggagcattgtatctagtcccctcgaatggcgtcttgacttaagtacttatgcacctgtgtcttctcccctgctggactggaagcatcttaaattcaactccataagtggatcattttcttatcacccaaagtgtccagcacacgggtgacatagtagacatttaacaaattcagttaaattctacaaacattttttgagcacttatatatacccatcaagctactagactgaggattcagaggcaaatgagacaaatacagtgatctctgacttccgggagcttacagtctaatctagaagtcagactggaagacaaatagttacacatgtgatgaccgagatcaatgcagtaggtgaactcttgtaaagcaagcaaggggaggtgtactctgtgcagggcaaatgcagggctgatcttctgcctctaaatgtttattaagttttttcttcatataaaagtgaccaatcctcttcgtagaaaatttggaaaagagaaaagtgtaaagaggacaaaatactttgtgattcccatcactcagaaaagctaacattttgctatatttacttttaatctctttgctaactttgtggagtgactgaagtctcaaattctttgaacagccttattgagatataattcatatgctataaaactggagagccagtctccatactggcagggtggcattctctccactcctccacagtcagattctcatcacaatttgattgagatttgaattagattgagtccgatgggcactctaagagcttaacaggagcatctgtgtaacaatgtcgagttcacagcacagtggagtggaggagctaagaatctatgaacaataatagcttcaagataaggtacagaggtcaggcgaggtgggtcatgcctacaatcccagcacttcgggaggctgaggtgggcagattgtttgagctcaggagttagagaccagcctgggtaatatagtgagacctcatctctaccaaaaaaaaaaaaaaaaaaaaaaaattagccagatgtggtggtgcgtaactgtggtcccagctacttgagaggctgaggtgggaggatcacttaagcctgggaggtcaaagcaaaagtgagctatgattgtgtcactgcactccagcctgggtggcagagtgagaccctatctcaataaataatagtaataataataataatagtaatgtagagtgatttaagtgccctgaaaaagcaataacatgggataagtactcagagaaagaactgcttctagcccaggatgcatagcaattgggatgtcctcctttgaactgggtcttgaaggatgagtaggatttgccgtgtgaacaacagaaccagagagaagaggtgtggggcaaagaagccatctagtttagctagagtggaggaagctggaagggaaggccggttagaaaaaggttgatgcagctgggcatggtggctcacccctgtaatctcagcactgtgggaggccgaggtgggcggatcacaaggtcaggagttcgagaccagcctggccaacatggcgaaaccctgtctttactaaaaatacaaaaattagccaggcatggtggcgcgcgcctgtaatcccagctagtggggaggctggggtgagagactcgcctgaacccgggaggcggagattgcagtgagccaagaccgagccactgcactccagcttagtgacagagcgagactccgtctcaaaaaagaaagaaaaaggttgatgctgggtcctgaatggtgtggatgccatgcagggagttggaatactcttctgtctcacgcactacagaaaggaataatatccggtattcccgtgttggattaacgcttcttatttccattaagttgggcatccggctcttcatctagaatatattccccttttatagcgatgtatggcatcttcccccagactataacctgctacaaatgcaaggattgcctgcagaaaattagccttgatctgtaatttcattaacagagccaagctgtgggtgctgtgaggttcatttttcctttatttctttcaagattgagtcttgctctgtcgctcaggctggagtgcagtggcaatctcagctcgctgcagcctctgcctcccaggctcaagcgattctcctgcctcagcttcccgagtagctgggactacaggcgtgtgccaccacgcctagctaatttttgtatttttagtagagacggggtttcaccatgttggccaggctggtctcgaactcctgacctcaggtgatccacccgcctcggcctcccaaagtgctggaattacaggtgtgagccaccagcacccagggaggttcattgttttcagaacaaaatttcaactaagtctgatggtaaaatcagctagttaaatcctacaaagcttacaagaactggggattttccacgtagaataatgtgaaagtaaaacgaaacaactttttctccccccaaggtcagcagtgcttagccttcagttcatcttatgttctgtctccccttcagcagttggcaggggcagaaaatcaagcgtgtctaaagcggcagtctaggtcattacggaagaatcatcgactttaaaaaagacatgatagcttctgttttcctaccatgaaccttcatggggaaaagaaaaagcaacatactcctccactcagtataaatgttaattctggacacaacttccctcagtattcttgtggcaaacagataagctgaacacagcctccttgaatggctaatttgtatcccatacttgtttgagccttttgttttcttggtgtacttcaaagaaaaaggaacactgtgaaatattcttgcacagcattttcgtggataccccttatgccaaccacaataccgtatttcagaggccccactaatttctgacgaaaaattacatgtacttttatttatttacttatttatttagagccggagtctcgctctgttgcccaggctggagtgcagtggcaaaatcttggctcactgcaacctccccatcccgggttaaagtgattctcctgcttcagcctcctgagttgctgggactacaggcacgtgccaccacacccggctagtttttgtatttttagtagagatagggtttcactgtgttagccaggctggtctcgaattcctgacatcaggtgatccgccagcctaggcctcccaaagtgctgggattacaggtgtgagccaccactccaggcctttatttttattttaaatttttttgagatggagtttcgctttgtcacccaggctggagtgcagtggtgcgatcttggctcattgcaacctctgcttcccagatacaagcaattctcagtacaggcgcccgccacaggtctggctaatttttgtatttttagtagagacgtggttttaccatgttggctaggctggtcttaaactcctgacctcaagtgatccgcccaccttagcctcccaaagtgctgggattacaggcgggaaccaccacgcctggcctatagcatgtattttaaaacactgccctgggccatctgctttttgaggatttgccaaatttcccaagtcaccaaaacagacctctagtttaacctgtaaaccttgagtttcctatattctcaggaccaaaaagtctcccttttcgttttcaacaacccactctgtgggcaatgaaacaggtcattttgggagagcatcctgtactgacatgacatcccacagtgccaattaaccaggattgtgcccactttgctacacaatagtttgtattgtttctttttacacagataaatattcccttgttccaacaacagcataaaaaaggtgtttttgttttttaaatgacctcttggtttgtttggggattcaaatgctcaagtgagtctagtttcaatttttaaagatcttaaatctctcccagaaagacctgtttccaaagtcacagatttttagatgttaagagttagactcaaagtccaaattttctaacccagtttctcttgagatcaacagtaacatttcatgttagaggtgagaacctggagaagaatttttatttgccagagaggttggaaccagagcagctaggagcacagccagccattacctccagccatttcctcacacctgctttgcaacaccaagagaaagcccttcattctgtttaggggaagaacagtacaagcacagctttatctatctgtctgtctatctatttacttagagacaaggtctggatctatcacccgggctggagtgcagtggcgcgatcttggctcactgcaacttccacggcctcccgagtagctgggggactacaggcccatgccaccatgcccacctaatttttgtaaagacgggatttcaccatgttgcccaggctggtttcaaactcgtgagctcaagtgatccgccagccttggcctcccaaagtgctgggattacaagcgtgagccaccacgcccagccatagctttcaatacatgccaggtaagaaaaggcataaagatgccaagtgatttgacaactgctaacttagcaggaaagcgtaaagggaaaagatgagtagtaaccacagaaggtgtgcttgacacgatttgataatgatactttctctctctggttcccagacccataacccagtctaatcatgtgaaaaacaccaaatttcaacagatgggcattctacaaaatacctgaccagtactcctcaaaactgccaaagtcctcaagcctctaatcccagcaatttgggagaccgaagcaggcaaatcgcttgagctcaggagttccagaccagcctgggcaacatggcgaaactctgtctctactaaaaatacaaaaagtagctgggtgtggtggcacgcacctgtaatcccagctacttgggtggctgaggcaggagaatcacttgaacctgggaggtgggggttgcagtgagctgagatcgggccactgcactccagcctgggtgacaaaggagtgagaccctgtctcaaaaagaaaaaacaaacaaaaaacacctgccaaagtaatcaaaaacaaagtctgagataaacaggagtctgttaactaccaagaagagctgaaggagacatgacgagcgaatgtaatgtcgtgtgctggatggatcctggaacacaagtaaggcattaggggaaaactaaggaaacaagaacaaagcatgggctttagtgaataatgttatcagtattggttcattaattatgacaaatgtaccaaagtaatgcaaggcggtaactacgggaactattataaggggtgtggagtataggggaactctgtactgtcttgaaatttttctgtaaatcataatctaacatgaagtttatttttttaaaaaagatgagtggtcaatgttggtttgtctccaaacattaattacaacagacgtaacagaattattaatattgtcgcagctggatgaactgagctcaggtacaccctaatacagtttcagtggccataagaggagcagagaaaacaagtggtttctcttcccctattcccttgtcaaaacatattaagtgtctgagaacttccttggaagaagtccacatctccatttctagtaagaagtttctagactaatattcaagccaagtggcattgggattctgctgaagtagatttgtgccttaactcaggccctagatgaaacttttgctttcaaacttttagtatctgctttacattttacaattaccaaactgttaaataacatcatagtattgaattgtttacaaatgtttattaaatgtcagtaatttttacaaagcaaatattaatagcaagaggcaaatgttttgcaaaatatgtacaaaagtaaaaagctgtaatgaactagcaactcattttataaaatcaaaccattctttccacttttagacctcctttagaaataatttattgcccatcctgaactaaagcactgacaaaaaaatttacaacaattatcagataatgtgcttagttcctggaaagttataaaaagatatatgtaaaaaaaaaatcctaagccacaaatattttatagagctaatacgagtcatgttttgttaggtacagtatctacggggttattacaaaatatacttttttataaggcttcttgtggtaaatgagctctcaccagagtagagtagtttagaaaagccatttcaaacgttttgcgattctgccttcaagtaagaggtaaaaggtaaatggcatagtttgttgcactgttgcttatactgtgcaagaattaatctctacccctttctttcctagtaccatcaaacaggcatgattaaggacaatttctcacttactatggcaaaaaatattatatacaagctttcttaacacaaaccaaagtcacataccaagtagtatatgacgttcagtgatattcactgactgaaattttatgcacactgagttccagcatactctgatccacctgtaaactttcatcatcaacagcagatttgtatatgtcacaaaactctccttatcaagacataaaatattgccatatcattcatgctttcaaaacaatgttcatataagctctcgcatttgaaaccagatggtaagacctgaatgctacaagagtgaacataacttaaatgctaactacacgttcaagtacagacataagaatgctagtggtacaaacactgtactccaaatgatgttgttaatcacctaccagcctaagactagtatctacttgatggaacttgaaaaagccataaagtccaacttgtttaaaatgttcagacttagacttacacttcaagatctagtatacatttattaataagccctaacctcgtaccataaaaaaatgggcatgtgctgtatttgggacatgcggacacacccacacccacccacaatctctcccctcctcatgtttactagactgaaaagccaccctgtatcctatcattaaaaaacaaaacaaaacaaaacaaaacagtgcttttagtcaagcagcacaacacaaggacagatcatctgtgattaacagaagcgaacgccttaaaatgatgggagagagacaaattaactaggtactaagtcagatttccaagtgaaaaagacatgagcaaaacttctggtcttaatttctcaaataaaactaaaataaatgaaatggtaacagagtgactttctctaaatttattagggagtttgttacaaatgtttgggctttacaggcatgatttcacggattcaaacaagaaattaacactgatatttagccttctcatgacatacacagaaataacattgctacaaactgcaatggagagaatcttgtttcaaatggcttagtttggggttttgtctaaatgtatcattatataatgaaagcaccaatttgagggtttctcaaatagtgatttgaattttaggacataacagtgtaacatggtaactttattcttcatatataaataaggcataatcggatgtgtattaatgctgaaaatacattttatcaaaagcataaatacaagtatttgggtacacattgaaagttaggacttaaccaatttcttcttacaaaaaatgataaggacatatggtatttgttgaatctaaatcagcacttctaatcatttctggtattaaggcgatcttatttccttctactttaaaccaaccactgccaccaactgaataaggatttccctaaacagcctcaatttgagagactaaccagaggaccttctctatgcaaattacatgccaatacaccttaaaagaaaataagacaaaagtgaatgagttttttcattccatattgctttctttggttgcagagcaatccagtgccctttccagataataaaattgaaatgaagatttcaatttaatatttggcagacagcaacaatgcaggttattaaaaatattaaaggggcagaggcatgctttgaattactcagattttcagaaaacatttgacaaaaccctttctctataaaagttatggtctaaatttatgttgttttataaggcaactgtatatacatttcttcaaggtcaatgaagacacttgtgtgatatttcctcagaattaaatgagaaggcattcagatttaagaacagaatgtaacacaggattaggcacattttattccaaatcataaccataaagatttagaaaatcaaatacatcaaagaactttaaatctaaattacttttttagagactggggtaagtttgcatagtgaaattatgagcaccttttcaattctgttcactaaatttcatctctctcttcatatagtggtatttcaaaaggattcagttttcatgatacaggtgtaagactcctttcaaacgtttttaaaatacaacgtataaaaaaatgtggactgaagcctttagattgaacttaaagttctactgaatgtcaaaacaagcctaagttgaatataagtaattcattgcctcaaaatatagtctagattttaaaagaatgttgattctgagacattacatgcagcagggaagaaaactgcaaatgcccaaaataacatgatatctatttggtgtttcaacacttcttggtggtaattcaaaagggggaaacttggtgatttctgctttgtcaggcaatatctatggttcgtatcacagatcttaactatgacttaagtaagatgaagtgtcctctttctatagggatctaacttgagccctcactggagtcaaatgttttggccattcaatttgctaaatgtatgggtaaactctccaatgaatagtccaaatgttactgtgcacatattccgatattcattagcactgcaattatgctaattttgtgaatttaaacaatgtattctttttggcaagaagcactagatgtagaactattcaaacacgcatgaatgataccatgataccacgaacatgcacgataccatgaacttgcatcacggtgccgggctacgtatgtgtagctcatggattaccatggcatgaaaatgctagaagttatatggatacaatgatagtggaagttcaaatgtgagaaaagtcaggtatgtcaagaacaatccctggttagttcactgaaaagccccactctcgtatcagacagcaagacagaacaacagccactgacttggaaaggctgggtgatccataacgaccaatctttcaaggaccaataaaatacctgagtacacagtcagctatacagtaaaatgacagatatcacagtcttaaaattttcaggaaaagtagaaaagctgtcagacttttcaagctgtcgccagccttggacttctgtttctctaattgtagcactacatacagcctagaagatagtatttcagtactgcaaaccagccattctgatgagttcactatgaatgtatctgcgatcacaaagctacttcgtggacacattttaatttggtaagcagtcgggggaggtcaatgtaatcatctttaggtgcgaactaaaaaaattactactgatccttagaagcatccttaaaacatttaaaatatacctcaaaaaagctggactttcaacaacaacaattatacaaatgtatacatactgtatctgttagagacacaccaagaatgaacaggaatctcaaataatgccttcttgaatagtcttgacagaaaaatactgcccttagcaaactccaaataaacaaaacgatgccacaaatggcacagtgtggagttgatgggactggacaggacagcaaaagatagatgtttgtgatgatacaacaatgatttcctacagtaaggattggtctttactgaccaactgagatagggcttaaaagtcaaatacatgacattctggaacaggttaagtttatttagaaagttctgttaccaagttgcttgcagtttttagttgctgctatggccagaatgtttcacatatggtacattaaactacatgataattaaatatgagaaaggcaaattctatttcactcgttacgtttgaccaaaacacggtaaacagcattagcttgccttttgctctcccataccacctgtgaactcttcatcagcatcagaccaaagatccttatgtaaacttgaaaacaggaagaacattaccttcagaaacacagaaatctaaaagcaaaacagctgttgtgtatacaagcaattaaaatatgaaggctaaaccttctataaacctacagaatgccatttcttagatagaacttctaacagcccttacaaaataggaggtcaccataaagttaggcaacaagtgtcactgctatatgtaaggcggacagaagatatcttgttttggaactgaatattcctaacctcatccctacaagtatttaaggacacctttgatacttggcactgcaggagaattcagtttggaaagtagaataatttaaagcctgaaatatgcctagtctgaggtcagctgggaggttttaactggacttgaatagaagccatggtgaaacagatcaaagcctgcattacagcaaatcttggcgatgagtcactcaacagctttcagccacaaaccaaaggccgcagaaaaagtactaagattttcaagaagttaaacgtagaattaagattgttctaattctggttgtaaactgctattttaaaaaacaaaacaaacagaaaacatcaaaaacacaaaaagatattaaaacagcaagtcttttgtacatcactgtagcataagctgcttgaggttgtcatgcagaatagtatccttcacgtcacggaaaacaaggcggatgttctccgtgttgatagcagtggtgaagtggtggtataagggcttctgttgctggtcccggcgtttgttccggaaacattccaccaggaatttttggacgtctcttaagcagtggggatccccttcaaattctaggaaatagtctttgatgctcacaatttgcaccttctcctcaagcaagtctgtcttgtttaagaacagaattatggagacattgctgaaaacccggttattgacgattgtttcaaaaatgttcagagactctgtaaggcgattggtcagtcgatcttccataagcacctggtcaaattcacttgaggaaacaaggaaaagtattgatgtcacactgtcgaaacattcaaaccaacgtttcctttctgatctctgaccacctacatcaaccattttgaaaggaacattttttatttcaaagtcgtattcatggatgcctttggtgggtcttctggcaagcagaatatcttgttgtgatggaatataatcctggaaaagaaaaaacttgttttatacctattaatcccgaagtaatgcgaatttttaatggactactaactggactagtgaatagatatgcaaacaaaatgatcttttaagtgacattttcagatagattatgcttattataaaatgccaagactggtcagacatggtgggtcatgcctataatcccagcactttgggaggctgaggcaggaggatcgcttgcgaagccaggagtttgagaatatcctgggcaatatagcaagacccacttgtgctccccacaacaaaagccaagatacattaaaatgttagcaggacgggttcaaaatttactacaaatggccagaatctacttgttttcatccctgcaatactactcaaaatttaagctgaagtcttatcaattgttcttacccaccctcactgctatatatccacctgcaatcttactccccactatcagccactcttggttctagccagagtgatcttcctgtctgcgtatctaccttctccacactgctccttgctcctctattaaaagcaatgggggctgggcgcgatggctcacgcttgtaattccagcactttgggaggccgagacgggcagatcacgaggtcaggagattgagaccatcctggctaacacagtgaaaccccatctctactaaaaatacaaaaaaattagccaggtgtggtggcgggcgcctgtagtcccagctacttgggaggctgaggcaggagagtggtgtgaacccaggaggtggagcttgcagtgagctgagatcatgccactgcactccagcctgggtgacagagcaagactttgtcttaaaaaaaaaaaaaaaaaaaaaaaaggcaatgggatctgattccagtgccaattcacaaggatcacttcccagttccaagttctgcccacctctctctaacctattctaaaagttcttttactgtgcaaccccactcatgacttaaaacttctatgttttcattgctgctatattacatgtgtgaaaaatcctttctctactataattaatttcttacttattgacccaagaactcaaactagtcacttactctgagtgtcagcacctctgtctgtgaaatggaggtgatcacacttggtctatatacctgggagggagggttgttgcaaggatcaaatgagctcttctctgcactcttggtcagtgaactctaagaccctgaacaaacagaagctgctggtcacacaagtctctggctactctgtgatggcacacttccttatgcaatgtaactggttcttccttgtcagtctagcatttttccaaaactacaacacaactttctggtaatacatgaacgggacagctaatatttatcatcaaggtcaaaatattttaaaaatcaaggcaggatttaaaacaatgctgttattcacaatgctgcactttatgcctttctgaatagtgtcatatgattttgaaatttcattacaagaatactcattgtctcaaaatggtgcaatggaattaagaatatatatatatacatatttttttgagatggagtcttgctctgttgcccagattggagtgcagtggcggaatctcggctcactgcaacctgcgcctcccaggttcaagcgattctgctcctcagcctcccgaatagctgggattacaggtgtgcaccaccacggccggctacttctttgtatttctagtaaagacggggtttcaccattttggccaggctggtctcgaactcctgacctcaagtgatcctcccgcctcagcctcccaatgtgctcggattataggcgtgagccactgcacccggccagaattcagagttttttaaaagtaggtgggttcttagttactggcaaccaacagccattcattaaataactctaggactcaagtgttagcttttccatgttttcttctagctttgttcagatacacgcctgctttatttataatcagcatatgcacacagcgttcagcctacctctgcatttttgcttaatattttgtgaactgttccatatgctgatacaatcatacctcattttaaaagacaagaaaatacaccaaatgcattaacgtgctgtactttacattaacattcccctactagtggtcattaaggttgtttccaatttttagccataattaacagaaatactgcaattaaaattctcatgcacattttttttttcctttggactatttcctaagattaaaataatcaggggtacgattatgacgttaaaggttacaaacattttaatgactctggatacttaacacccgactgctttctagaaggcaataccaatttacaacatacacctatgccagctccttcagaaacacgccgggccctgagcttttaaaaaatgtaattccataaaaataaaaagttctctattattgtctttgtctctattaaagctaataatctagttagcaatctaaaggctgcttcacatgaagcacagaacttcatgcaatcgagtgctaaatagtctggcagagcagagtatgttgatgaggacacacacatactagctgtgtgaagaagaagaaacctgccttatgaggaggcaaatgaagctgtgctacatttagagagtaacagatgactctaaggcaatggctttcaaaattttcctaagcagcagaaacctttctcccactgaactcttctgtgtacgcccaatacagaggtcaaacaagcgagatgctctgcctgcagtgggccccgctggccacagcgccagcttagagctgctggctccgaggaatacctacaggaaaatgatagactctcttttcaagggcgactccccctacctcgtggagtctcttcagccttttaaatctagccctcctactccgtgactcgacacaaagggggcatgaattcgaaaatgtcatttgtcaaaagatttggaaatcagtcaacccactgtgttctatttctgtttacaaacaaaaacctctaaagatactaaagtataacagataatgcacaatatcatcttcaaacacaaacttctttctctaaacagttttacttccaagaaatagcagacaaagcattcctcaagaaaatggtagagacctggacagttagagggagaaaaaagaagtgtcgtgattaaacaataaaaatactttcattttgaaaaaataaaaatcattcaatattctgagctaccaatcactctaaataaagcagagaagaatcagaacgccaccactaaaaaaaaaaaaaaaaaaaaaaaaaaaaaaaaaaaaaaaaaaaaaaagagagaaagaagcaaatagcttaatacataatttttctaaatttcctaacatcgatatcctgacttctgctttcaaatggcactaaacataaacatttggtttaaacacttactggttctccaagtttatccaagttatccaggaaatattttacagattcaccctaaaaacaagaagaaaacaaatagttattagggcttagaaatggaagatcttgttacaacagtttacatcatactgtctggttgtacacttaacccaaacagactttgtttagtcaccaatttcagacagctaaccttcctaaaaacatataaaacgtctgctctgtcacagactgctaaatctgcaaaggcaggctgatttcacaaatgcttaatagaatcaatatcccaagtgatcatctgcttggacaggattacacgcatgctttttgctataactacgtatccacagtgaagacatataattagaagatgaaaactgcttttgagataaaacataaatctacatataaaatttaagtgacagtctttttgtctacattttctagcttaatagtgacgatagttatcttcagagacaaaccaaaccagagatgaggtaagaatactgtacaaaatcccccaaccacaggcatggacaggcgtgccttgctcaggaaggccctggatagtgctgccagcttcacatctccaacaggtcttttcccgagtggcctatcctttctgagcccagttttctcgacgaaacttccaagcaatttcaaacatctaaactgtacgagaatacattcctaacatgaaaacgcttgaccagagcacacagagaagaggggaactattttgggaaagaaggggtctgtgtccgagtctcctagtcctcaccccctgcgtttcactttcccgcgggattctacagctgcagcattgtccctgcctgaagctacttccaagtgttcctgaagcagcacctcatttagtatgcctgggcatcatgtgaagatctcctcacactgcaggctccggtttagtaggtctgggtgggaccccagtttctgcaattcaaggagtgcctgggaccacactttgagtcacaaagcttgaaagtagcagttctataattttttggtctcaagatcacacaatatgatccagcaatggcactgctaggtatatacccaaaagaaaggaaatgagtatatggaggagagagatatctgcacccccacgtttactgctgcactcttcacaaaagccaagatttggaagcagcctaagtgtccatcaacagatgaatgggtaaagaaaatgtgatacacatacagaatggtgtcctatttagctataaaaaagaatgagattcagtcatttgcaacaacatatatggaagtgtaggtcactatgttaagtgaagtaagacagacacaaaaagacaaacattgcatgctatcacttattggtaggagctaaaaatcaaagcaattgaacccatggagatagaaagaaggatggttaccaaaggctgggaagggcagcaagggttggggtggcaggaggtggggacggctaataggtacaaaagatagttaaagtgaatgaatatggaccagtatttgatagcacaacagggtgactatagtcactaataatttaagtgtacatttagaaataaccaaaagagtataattggattgtttgtaacataaaggataaatgcctgaagggagagataccctatcttccatgagtgattattacgcattgcatgcctctatcaaaacagctcatgtacgccagaaatatatgaatctattatgtgcccacaaaaattaaaaacagaaaaattaaaaaaataaaaacggaagacatggaaacaaatgatgatgtctctggactcaataagctcaacagcttctgatcacttctttttgtgtttagtgtcctcattcaaattttatacaaagctcagtacgaggcaactggtatcctctcctcctaccttcctaaagtgtctggcagataaaatatgaattactgggaggaagttacccttcaatatttttttcttaacaatttcagaagtgatcaaagtcttcttgttttctaatattaatgttaaggaacagatgtgaatttcagtcctttctctaacaaggagtgatctggccaagtctctaaactcctccaggtctccatttcccccagagttacatgaagaagttcagtggttcaatggataaccaaccgcttaagttctgccctgtgcaacaatttcagttagttccactgatttcaagttaagttctcctttcctcataggccatgtgtttgttaatcctaaatctgcttttgttgtgactcattcaagcggtgttgcttccacgttctttgctaataaataaaggatttaatgtattgtgcaagaatattatgggtttaagactcactttttgctggttgtaacttgaggctctcatatttttcccagttcattttatgttactgaagggaattttttttttttttgagacagggtctcaatctgttgcccaggctggggtgcaatggcgcgatcttggctcaatacaacctccacctcccgggttcaagccattctcctgcctcagcctctggggtagctgggattacaggtgtgtgcctccgcgcctggctaatttttgtatttttagtagagacagggtttccccatgttggccaggctggtcttgaactcctgacctcaggtgatccacccgtctcggcctcccaaagtgctgggattataggtgtgagccaccatgaccggcctggaaattttaaaaataaaatttcaaagaaatttcatttcacagttaacactttaaaaacttaagattattttattcggcccttagctcttttttctctgttcagaacactacaggtaagtttctaggttactgtagtaaggctgaagagtaaaagtagcatggcactctgaaaagtgttccaatatttctttagccttgtggatatttcagttccatttaaatggcatagcagccagtgtacctgggttccagccccaagatagactttattactgacaaagtcaacaaacaatattaggtgagcttcagtgaccctttgagtattagaagtctatgaggttccacgaaccatatttcttacgagttttacaaaatggtgtctaagctgggaatggcttcaatgttgcccccacttcacaacaataatttgttataaacatcctttgcttgtaaagacaaaatgggtctggagtcctaagcttgaaggtaacagaaaagctaagaacaaaagttagaaaataatttctattaaattcatagtcatacagagagaggcttagcagcttatcgacccagttactgaacaagtgacatttgtattcaatgctctcttctgcacagctaaaatattaaaaggaaaggatttagaatgcacttctttaaaaggatatggaatttaagctggatagccaaagaacacacaagaagaactgatctgctgttttagaacatactcaaaaacaccagtggctttatgtcaataagaaaagggcaactctgcttatagaaaataggtaaagagtagagttttttaattcaaagtctgattcatgccttaagaatataacataaggtttatagagatgggtatcaaatatagattttctaataaaaagcaaggtaaacatattctagaaagcaatttggcaatatgtattaagatctttcaaatgatcctcaacacagtaccactgaaaaagtatatacaactacaacagtgctagtgaattactattatggcagaaggaagagctggttgagagcaaatggattgctccttatatttaactagattctggaccaggggtctgtccacaaactatatagcctgaaggccaaatccaacccaatgcctgtttttgtacggctcatttttaaatggttggggaaaaaacttaaaagactatttcatgatatgtaaaaatgatatgaaattcgaacttcaacatccataaataaaaatgcactggaacacagccacgctcacctgttggtgtatcgtctatgggaacttccaggctacaacagcagaggtgaggagtggagactgaggcagtgtgttgcactctcatgactctgcaccactgcttggtgcaccacaaactgcagtgacacagttataacttgaaaatattccaagtgtcaccagtattgccacaccatgacattaaaaaaaaaaaaaagggagtaaatacacatccatccaaataaaaagaaggccctgaataccacacttttaaggcacagtaggatgtaaataattttgctatcaaattccatggtaaagcattatttattatgcaatgacactatagctatgctagaagaatacaatgtatgccaacatttacagactaagctttcttcaatcctcccaacccacagaaaagcaacggtcataaaacaaaaacaaaacacatgcaaaattttaaaatggaatagcttatcactgcagaatttcttcaccaaaacaaaaaatgaaatgagactgcaaccaaagtattttcaagttttcaaagtttttgttagacaagcaaggaatgccatttaccaagtgagtgagtaactcatgtttgattgtaacagctgaagaaatatggccagagaaagtaaccttgtttaagactattagcctttcagtgagagcagctgctcagagttgaggacactcggaacaaccatcaactgtcaattaagaaacatggcaaattatttcagtggttttccctggctcttgctgagtttattaccacaatgctcagttgttgtttacttagggaatcaatgccaagtttgaagtgactgaagaaccagcctgtatgaacagtccatgtggaagagctacgtgtgagagtattttcagagaagctgagaaaacactaaatgagtacagcctaaactggaatatgctaggctgtgttacaactgatggtggtaaaaatgcgtggaacagaaagggggtcaaacatgcaaaacctgtgtaagggttactcactgcattactcatgagcatgtaccttgtgggaaacacatgaatctattgtgctcatgaacgagtaatgtcagtgatgaatttaacacgctcctgtgaacctgaccatcagcaggtcatgagtttctgtcagaaacaaaaagtgaaaattctgacacagttcgatgtcttagcagcgctaaagttttactgacttttttctgagcacagggatggaactgatttcttttcctgaacaagaactacccttaaccactattgttgaacgctgaatggtttcggaaattagccttagggcagacttgatttgatttctgaatgaattcaacctaaaattacaaggcaaaacggcactgttggtgaaacttacactctggtaaagtcatttcgacagctagcatagttttaatcaaaacaatgtcaaactgctttatatactttctttgctgtcaaaagttaaaacaaaaagtgagacttccattcccatacaaatttccagtggacataatatttctaaactctaactacagttccaacagcatctttcagacccctatgtaagtgcaaaggaaatttccatatttcaaaatccatttaactacgcaaatgaagagcttctacctaaccttcaagtggttaatctgcaatgtaatgacatgctaagaggcaaacactgagaagaatctaacaggattctgtaagtatctctcaagcactgactatgctcaataaaaatcatatgctatggctggcacggtggctcacactgtaatcccagcactttgggaggacgccaaagcgggaggattgcttgagcccaggagtttaaaacccacctaggcaacatactgagactcatctctacaaaaagttaaaaaattagctgggtgtggtggcatgtgcctgtagtcccaactactagggagggtgaggtaggatcatcacctgagcccgggggttgaggctgcaatgagctgtgatcatggcactgcactccagcctgggcgacagagcaagaccttctccaaaaaataaaaaatcatatgctcatttggtagtatctgtgtgaaaatatattttcaaggatgaaatgtgtaaaatctcattacagatcagaatggaggaatatttgcaactgactctgacaaaaaaatgctaaaacattgaatcccaataaacaaaatgttattccaaaagaatccaatttttttcacattcgtagccacaaaaacttgcacacaagtttatatttttaatctcatcaataaaactttttatataaatacctacataatgcccttgatttcttcccttggcacgcagtgcctaaaatattatactatctgaccctttacacatttctagaccaatgatacttaatcctggtaatctatcagaattacctaatgtgcttattaaaaatacagattcccaggtctccaaacaaatccacccaatcaaaatcttagcaagttccgagagaagtgattctgatgtagccagccctcgcattacttcaaatctggatatatattttactcaaaactagatttcgtattaatttcatcttttaggatcaattacacaaaatctgtttttaaagtctaaaaatgccaagataagaaatttagtttagttttatcttactgtacaagtgggcttgttttttgttttcttgagatagggtctcaactctggttatccaggctggagtacagtggcacaatgtagccactgtcgaggctcactgtagccttgaccacccgggctcaggtgattctcccacttcagcctccagcgtaggtgggattacaggcacttgctaccatgcctggctaattgtttgtatttttagtagagatggggtttcactatgttgcccagggtggtctcgaactcctggactcaagcaacccacccacttcggcctccgggagtgctgggattacaagcatgagccactacacccagctgtaaaagtggatttcaagcagtatttgcattcttcataattcaccacgtctcacaagaaactatcaggccttcttttgggatatctgaatcataaacaataaaattaagtctatatatagcttcctcttttaaaaaaacttatttgacaattctgacaagctttatttcctactgtactacagttctagctgcctacttgtctatacccctagagcctattttcaaatgttcaccatagtccacagctttcaagctaactcagattttgtggttaaaaattaatggacctgatactccagatgtaacattactgaacgtgctgagaagcgcggatgggaaaagttatcgttaagtgctacttatattttagcaataggactctaaggaacttgaaacctcaattaaacttacaaaattaatttgcttctataatagacacctaaacattgcatgataggtaaataagcaattaaaaatgcttaataggcagcactccctggccaggttcagtggctcaatgcctgtaatcccagcactttgggaggctaaagagcaaggatcgcctgagcccaggagttcgagacccagcctagaacacatagagagatcccatctctacaaaaaaaaaaaaaaaaaaattagccgggtgtggtggtgcacgcctgtggtcccagctatttgggaggctgaggtgggaggatcacttgagcctaggagttcaagactgcagtgagccacgactaagcagcagcactctccatcgttttacgtggtaaacaggtaaaaaaactgcactatgatgaaaacagcagataagacacaacaaaaaaaattataagtaatgtataaggttttaattttcagagttaaaatgagaggcctactctgccaaacattactatgattttatatattagttaatcatcactaaaaacccaaaaactatacaattttctatattttatactcccaaaataagaccaaatcactactctccaccaaaataaaaaaaaaaaaccataagacaacacaaaaatcacatccaacccttaaacaaacctcaaatccttcaaatcaagactacactatccctctgagtcaggtcagagtcccaataccaacataattgacaaatacaatttatcactttatcatctgatccccaaagggaatgatgatctatagttatatcaggaagccatgactagaaaatactctatggcttagatgtaagactttccattaaaaacaaaaacaaaacagtactcattttcacaaatcataagccaagtttatataggctgtaaaataaagccgtttccaaagtaagtataattaaagaaataattttttgccaaatgaatcttacactaaagaatcacaaattcatcaaaaaatatgaagcagagggggttcattaaaatacagaacttctagatcattcaagatctaatatagtatgaacccccttttaagaaaattgcatagaaaatgagattacaaggaaactcatcaaaatgtaacagtggttataaagacatatacatgaaccttttccaagcacattcaattttttgtttgtttgtttgtttgttttgagacggagtttcgctcttgttgcccaggctggggtgcaatggcaggatcctggctcaccacaacctccgcctcccaggttcaagcgattcttctgcctcagccttccaagtagctgggattacaagcatgagccaccatgaccagttaattttgtatttttagtggagacagggtttctctatgttggtcaggctggtctcgaactcccggcctcaggtgatccgcccaccttggcctcccaaaatgctgggattacaggcgtgagccaccgcgcccggcctcttttcccagcatattcttaaggctcactactttctgaagcagaaggaaagaaaccattttatgaaaatctagtttactgacttcctaataatttttctacaattctgatcttaacactagcacttttgtgtcctttctcttgcctcagaaatccaaagtgcacctgtctttctcaaatcatccagatttatttatatagtaaagccaaattcccacctcacacccctcccccgccttttttttttttttaaagagataggttttcactatgtttcccaggctggtctcaaattcctaggctcaagcagtcctcctgcctcagccttccaagtagctgggattacaggcgtaccaccacaagcagccactgggggccctttaaaaatctaagaaaaccttttgcttaaatttccatagtggttttatcagcacctcctatggcatgagtcattttctacctcatatgcaatcatctgtgtacttgttttatttccttttctacaatgtattgttcctggggacagtttttgccttcttagtcactgtatccctctaaatatttgcatatagtgttaaataatatatatgtttgaaaaaagtgagtatcacagaattggactctctttgaaactaggaacactgacatgctaatttctcctttacaacaaaaggctttcctaagaatgatgggagaggccaaaacaaaaccaaatattcaaaacttctatcagttaagaaaacaaggctgggcgtggtggctcatgcctgtaatcccagcactttgagaggtcaaggtgggcagattacttgaggccaggagtttaagaccagtctggccaacatggtgaaatcccatctactaaaagtacaaacattaggctgggcacggtggctcacgcctgtaatcccagtactctgggaggccgaggtgggcggatcacgaggtcaggagatcgagctcacggtgaaaccccgtctctactaaaaatacaaaaaatcagccgggcgcggtggcgggtgcctgtagtcccagctactcgggaggctgaagcaggagaatggcgtgaacccgggaggcggagcttgcagtgagctgagatcgcgtcactgcactccagcctgggtgacagagcgagactccgtctcaaaaaacaaaacaaaacaaaagtacaaacattaggcgggcatagtgatgggctcctgtagtctcagctacttgggagggaggttgaggcaggagaactgcttgaatccgggaggcagaggttgcagtgagttgagatcacgccactgcactccaacctgagcgacagagtgaggctgtctccaaaaaaaaaaaaaaaaaaaataccacctaccatataaggaagaaagtggaaaaaaaaaacccacttcacaggtgattcttaaggttgctcatcatctacttgcaagaaccactgtaattataattttcctaaatggtagcagttgcctcttgtaattagctcactggtacttagggcatttcatgaaatacttgagcctaagaagactgtttcatgtgtcatgagaggtatgactgcagatcacttgtcttggcctcaacactaggatgatagcgccacaaccttaagcaactttcaggtcaccaagaaagatgaaagtcaaggaatacagatcaaactatctctaattcctgcctccctactttactcttcagctccacaccaccttcttcttccaatctgcagcctccacttcccccacctacacaccttccagagagctacagcctctacatgcagtctctagaatctagccttccccaagtaggtgacagtttccttaaagaggaatactatggattttgtttcttaaaaaggaggtagaaacaaaaagaaaaagaaaaagaaaaaaaaaggaggcagagttactgatataatactgagaagttcacctgaatgagaaacataaggatgttgggaaaaacttggtgaacactgaaggatcaaggatactgttcagttgtgctgctgagtcaaaaagtatttaccaagaactacctaaaacaggagaaatataatagtatctgataaaatgctgaattagctatgcagttagcatgtctcgtgtttgaagtctccagctagtcccaactgactatctccaacattatctcctacttttccctatgaaacaagctccatgctcatctccccatgcttctggaaaattctgtgcatattcctacctcctctgcctaacaccatttcccccacacgcctctgcttccacctctccttctggggttcttactattatacagggagcaaagataaattttaagttggaagacagcttggagaacaagtaaccttatgctccattttacagatgagaagcctaagggtcagggaagttaggtggcttagccaacaaaactgtttcagtggcagaaccaagaatttaatgtatcctgattcttatttttcccctacctccactgcaacttcccaactctcggtaatcatactcttcactcaatatcttttgcacttacggtttataccactcatggcacttctttatttttatatgtagtcctacatgtcaaatttagactcaaaatctctttgctacacctccctgtatcctaggatagcaattttaccctgtacagagcaatagctacataaacatctgttgaattttttgtattataacttcccctttatgacatcctgtttccatcttattatttctacaaatgtcagagttgtcacaagcataatacattgaacgggaaggtttttttttttaaaggcaactttctgccactaaattccacttgtttataaatgtaaatgctaaagacagaaaagagatcaactcaaatgtacatggcaaagatcttcagtggcataaagtgcgtgactcttttcagtaagtctgaatgctttgaagagcactgtaggcagtggtacgggaagatgctaagacaaaatgggaagctcctactccatgtaagtaaccactcagtgttaacatcaatcaaaaagacatcccataaaagtgataaagtatcctggtagttcgaagagaataatataaagatagaatttggaaggagcaaagatgatgacaaatcttcctaactgctttttctctgagcagatttagaaactttcagaatatttataatcctgaagtttcagcagatccaaattcaaagtaatgaccaagcagggctattaactactccaagactagatctccagatgctggtgaagaatcacagatcatgcagaatttgaaaggtttgtttttgtcatagatagtatatgttctaatgattaataccggaaatctgacaaaggtcaaattctgataatgagaatgttaggtaataatatgcatcacacatgtaattaacttcattttactggattttatagactataatgaaggtcagaagactatcacactcaagtaggctattcaaaagtttgtttgctactaaaataaaacatcactgcttaatcttgtaaaatgtccagaatttaattgcaggccaattaagaatgtacgtaaatggcagaaatttcactttgaaaaaaacaagccaactataaaggacaaaataaagtgaattaaaaagtttccaattttggttgggcatggctgctcatgcttgtaatctcagcactttgggaggccaagatcagaggactttttgagcccaggagttcaagaccagcctgggcaacatagcaagaccccatctcaattttttaaaaaagtacccaatttttatgtgttgagatctctttagttatgaggctaacatcacctgcaagtgtcttttaaaagtaaacaactcaaaaaatattgaaagtaaaagaaaatctatattaccaagataattaagtagagtttcttctgaaacctaagtatacatgtgattccaaaaatgaaagtataattcaaagttaatatccagtttttctttatagagaaccaaccaagtgctataaagagcagaacatcttaattactagcatacacagcctactacatacctcggctatatggcatggcctattgcttctaggctacaaagctgtacagcacgttactgtactgaatagggtaggcagctgtaatacaatggtaagtattcgtgtatctaaacataggaaaggtacagtaaagatatactacaaaagattttaaaaatgctacacctgtatagggcagctcccttatcatcttacagggccgccattttatatgcagtcagtccttgaccaaaacatcttcctggcacacgactgtaaatgtctgtgttctaaaatagctaagcccaatggtttaaatggtttacacacttcccatgcatatataagtcctttgttgtgcaagtttggaacatttcaaagaggaaaaagaatcaagtgatatcagagaaaactggaaatctaagtttattcatacttaatcacaactgtgagttacttttattatcgtaaggtttttatatacctataatatacttttaatttccatcagtgttataatcccaaaacaaatccaggtcaaaatgttttctaaatatttattaggcaggactcattaagcatatgcttggggaaagctattcaatagcaaacttattaacttgcttttaaaagagacctaagagttgggcatggtggtgcatgcctctaattccagctactcaggaggctgaggtgaggtagggggtactattgagcccaggagttctacaccaacccggacaacatagagagagagagagagagagagagagagaaagagagagagagagagagagagagagtgtgtgtgtgtgtgtgtgtgtgtgtgtgtgtgtgtataaaagagacctagatataggcttttatcaataattcgcatatgtatacactaataatttcagtcctggaaacatcttgataaagtcatatataaataaggagctgttcattgtaacagtaggcttataatgaagtctattcagaagccattccatctagcatgtacttacataaagttttcagcaacaattaaatgccaaacataaatagatacaaaatggaaaactctggggttaaggctggttaatcaaccaagacttttcgattcaacccgaggatatggctagtaaaaagacagaaggtaatatttattagtacttacactcaatttcccaccctatctgtcctttctctctcgtctctccacatattaacataaaaatatgaaatataccatgagattgttctgcccacactatctgaaatctattacatgcaattccttaaagacagtaaatacaaaaccaggcctgattacattttaagtttattcacagctttgaaaatgattttaaagttaaaaaatcttggaaccatcctatttcaaacatttgaaatatactacctcttatcctaggtctttctccctttaatttttatttcaaattaagtgtgataaagaatgacttgagaaggtcttcccagtccaaaggctggctttacatacagcatacaaaactctcctcctggttctcagagcttaccatggaccagtttcacttcttttatttaatgcctttccaacattttcattttgcttggttgtcacacgggacctattctattggtctttatctttgatattgccttttctgccccatggctttctctatgacttcatttttctctggaaaaaaaacacagtattaggctgggtgcggcggctcatgtctgtaatcccagcactttgggaggctgagatgggtggatcacctgaggtcaggagttctacactagcccggccaacttggtgaaaccccgtctctactcaaaatgcaaaaattagccgggcgtggtggctggcacctgtaatcccagctactcaggaggctgaggcaggagaattgcttgaaaccaggaggcagaggttgcagtgagccaagatcgtgccactgtactctagcctgggcaacagagcgagactccatttaaaaaaaaaaaaaaatcacagtacttgatgtgatgtataggatatgttttcaatgagggtaatactgtcattgttatcattagagcatagttaggctggacacactggctgacacctgtaatcccaatgctttgggaggccaaggtgggaggatcgtttgagcccaggagttcgagaccagcctgggcaacaaagcaagaccccatctctaaaaaaaaaagaagaaatcagctgggtgtgggtgtgtggtagacctgtagtccagctactaggaggctgaagcagaaggattgcctgagcccagatgtgcaaggccatagtgagctatgattgcaccactgcactccagcctgggtgacaaaatgagaccctgcctttaaaaaaaataattaaaaaaaaaaaattaaaaaaattacagcatactcaaagtaccaccagtcatgcctttctgtttagttcaggaggagtaaaatgttcagttcatgaggaacaaaacttatagccgacaagccattttcctttgctgtgtagatacataaaaattaagcagactccaagtgaatacacagttccaaatttcttgccagcaatttctatgtacatcagttaaaattttcaaaagaggccgggcttggtggctcacacctgtgatcccaacactttgggaggccgaggtgggcggatcacaaggtcaggagtttgagaccagcctggccaatatggtgaaaccctgtctctactaaaaatacaaaaattagctgggtgtggtagtgggcgcctgtagtcccagctactcgagaggctgaggcaggagaatcacttgaactcaggaggcggaggttgcagtgagccaagatcaccctgctacactccagcctgggcaacagagcaggactccgtctcaaaaaaaaaaaaaaaaaaaaaaaaaatccaaaagaaccaaaattagtcagttacatcataaaccatttcaatatttgaaaatttctttttcaaactaagtatctttccagaccaatgtaagacagtctataatagcataagtagaatactacctttatctcacttagataagttatttcaatgttttctagcatataagctacaaaaataaactactgcacatgaaataagagcttttttggaaagaacttattacattattctagaaattgcctttttcttgttgctgctcacaaattaataaattcctctttatatcaagtttttgtgttggccttatcaccaaaataatttaaggctaataatttttttttttttttgagatgaagtcttttcctgcctcagcctcccgagtagctgggactacagacacccgccaccacgcccagctaattttttgtatttttagtagagacggggtttcaccctgttagccaggatggtctcgatctcctgaccttgtgatccacctgcctcggcctcccaaagtgctgggattaaaggtgtgagccaccgtgcctggcccaaggctaataatcttaatgatccaagtgttctaggagtatttccgtagtcctatcaaatgttaacacaaaatgtacaacgcagtttagtaattctcctactacagaagtcacaaaaaaaggaccttactaaaatgcttcatcgtggagaaacagagaaaaaagttttagccatatgtttagtatttattttattttatttttttgagatggagttttgctcttgttgcccaggctggagtgcaatggcacgatctcagctcactgaaacctccgcctccctggttcaagcgattctcctgcctcagcctcctgagcacctgggattacaggcatgtaacaccacgcctggctaattttgtatttttagtagagatggagtttctccatgtttgtcaggctggtcttgaacgcccgacctcaggtgatccacccgccttggcctcccaaagtgttgggattacaggcatgagccacggtacttaacaaaattaagtacaaattttaaatgtgagaaaggagtttaatactgcagagatgggtcagctctgacatcatatatattgctgatcaggtagcaacatggtaatatttaccccatatttgttccatgttaccatttagcaccactatcttctgttggctaaaaaaatacatatatagcgggaagaattttccatttaaataaaaaatacacatctatttctaaaaaatgccttgctgctcctctgagaaaatcacctcctccaggaaatgctcatgatgcaacattaaatgaacaggatataaagttgtacagaaagtacaaacaagcttatctcaacatccaatatcgtattcaaatactggaaggaaatacaccaaaatgtcagcagagatgtcctgaggtggtaggatagtggctaactggatgatattttacaatgaaccatgtatgttttaaaattttaaacttaaaaaaaacaagctaattaaggttctggagcctgtaagtcatgaacagacaaaccactttcctactcttcagttttcacataatgataacaacagaaagcttaagaattctgagccttgaaaaatccctcaaggttaaaatacttttttgaaaagggccaatcatatataatcccatcagcatatcaagaaatatttagctttgtcagaactagaacccttcgttgttaattttttttttttttggattcccaaaaagcaacgacttcaattgttaaaaagaaaaaaagtatatgctgttttccaacgcaggacatacttcccaaatacagtttcaattcctccactatctaaagagaggcgcctattagagcgcttcataataccccgaagtcctcgtgaacgcactccaggtggaaaattctgctgtgatgatgtgctaaaaaataccctataactcaaatattacacaataatcaacactaattaataaggtaattctacgcctatgatcacaaaacaggtgaaaggaaaacccagatgactttattcccagtttagagctcaatcattatcccaaccaaactctctccagaagaaaatttccacacagcctataaggagcactaaatactttcccatccttcacagtcaggcagcaaagcaagccaacctgtaaatattttcaaaagctgatgaatgtgaaaattagctcaaaatgtatgctggcacatcagctcctgtttccaagtcccgatttggtcaattttgttactaaggaagcaataaagcaaggcagctgagtatcagcctcgggctttggaatcctacaacccggagtctgaatcttggctctatcactaaaactagctgggccaggcacggtggctcacgcctgtaatcccagcactttgggagaccaaggtgggtgaattgcttgaggccaggagtttgagatcagcctggccaacatggcaaaaccctgtctctattaaaactacaaaaattaggtgggtgttgtggtgcgtgcctgtagtcccagctactcaggaaggtgaggcataagaatcgcttgaatctgcaagacagaggttggagtgagcctacatcgtgccactgcactccagcctgggtgaaagagtgagactatgtcccaaataaataaatatataaataaataaaactagctgtgaccttagcctctatgtgtccttcacctctgtggccatatgctttacttacaaaatgaccagaactcgactacatgctctctcaggtcatttctaggttaataaagagtgattctgcacactcttggcagaacagctgctagtgcagtaaatgatcgcactgatcatttcatttgctccccactagattgggagcccccattaaggcagccagacaggcagttcacttgggttgctagggcctagtctgggccaagaacatactaggggcaggtattcagtacatgtttgctgaagaatgaatgagtgcaatgtatataactgatcaggttattaccccaactaaattggaaatgatcataagtaaaataatcaagaataaagtgaaaaactcttctgtatttgcctgacccagcagattaacaatcttatgaactaatatttaatacttctgagactgaaattcaaataaattggttaatataaataaaatgtcctctcaaactttaaaaaggtcagaaaaaccacaacttactaagccagagggttgaaagtactgtaaaagggaaaagagaacagtgagcttgacttcaactgaatcttctccacttcctcgcctctctctcctcttaagcccttctaggctggcctctccctcaccagggcacctgctgccatagtcagcatatccaactttcctgtgccaacatcgattcttcctagaattcttcctagacctctcaatggcacaggacaccactgaccacttttttcttcttgaaacactttcctggcttccatgacgtgacatgtgcctacatttctcctacctttctggccacttctgctaggatctcctcctctgaacattctcaaaagatgtagagatttctcaagactctactgtcagactgagcacagtggctcacacctgcaatcccaacacattgggaggccgagagaggcagactgcttgagcccaggagttcgagaccagcctaggcaacatggagagagacccagcctctacaaaaatggaaaaaaaaaaaaaaaaaaaaaagacaaaaagactctaccgtgagccttcatctcttctttttacaccctttccccgagtaatcatatcagaaaaattatactcagtaattatttcacagacattaaatatctcctagatacaaacacctcctcaatttctatctctagccccaaactgttctggattcaagactcatgtatcaagctgtcaacctggtatctccacccatacatctcacagagatctcaacctagtacttaagctcgttgacttccaacagggttatgcctcaacaaacccatcacttaagatgaaaatatcgttaagtcaaaaacacatttatggccgggtgcagtggctcatgcctgtaatcccagcactttgggaggccgaggcagacagatcacaaggtcaggagttcgagaccagcctggccaatatgatgaaaccctgtctctactaaaaatacaaaaattcaccgggcctggtggcacgtgcctgtaatctcagctacttgggaagctgaggtaggagaatcgcttgaagctcggaggcggaggttgcagtgagccaagattgcaccactgcactctagcctgggcaacagagcaagacaccatctcaaaaaaaaaaaaaaaccatttatttttagagacagggtcttgctttgtcactcaggcttgagtacagtggcataatcacggctcactgcagcctcaacctcctgggctcaagggatgctcccacctcagctctgagtagctgggaccacaggcatacaccatcgtacccaactatttttctgtatttttagtagagacggggttgcgggggggcgtttctcaccatgttggcgaggctggtctcgagctcttgagttcaagcaatccgcccaccttggcctcccaatgtgttgggattacaggcgtgagccaccgtgccccgcccaaaaatacatttaatacatctaacccaccaagcatcacagcttagcctagcctcccttaaacatgcttggaacacttacatcagttgatagttgggcaaaatcatctagcacaaagcttattttataataaagtgttgaatatctcacaacgtttactgaataccatactgaaagtgaaaaacataacggctatatgggtacctgaagtacagtttctactaaatgtgtattgcatttacaccaccataaagtaaaaaaatcgttaagtcaaaccacagtaaaccagggactgtctgtatgcccaaactaaactcttaatcatccccctcaaatatcattctcccatgatcctgtgatttgagtaaatagcaccaatatccacctagttgataaagccagaaacttgagtcactcttaatatatgcctttcttccctaccccacatccaatctagcagatcccaatgattttccctacaaagtatatcctgaatccattttcttctcttatctctacagccaccaactgacgacaagctgcttgctctgcaatagtctccaaactctggaactggttaggacgaagaacagtatctggtgcaaaggctctccctcactcccctctaacttccacacagcagcctgagtgatcttgcttaaaatcctttggtggcttcccaaggcagtcagagaaaccccaaacttctcaacatgggctacaaggcctggcagtcacaggctgctgcctgcctcttccacctcagttctccctcactcactcctccaccctggcctggatcacgttttctgaccagcagtaagtttttttccaactttgcacatggtgctcattctgcctggagcattcttccccctcctttcctggaggactttctcatccatgggatctgaacctaaatgttgcctcctcagaccatcctcttggtctctcattgtttctcttccttcgcagcatttaccacatgtgtaattacatatttgtttgcatatttcatgtagattactctgactagcatctaacgtcaacgcagagattactttcacttggttcactagcaaacacctaacccacaaaaaggtaactgactcattaataggtgttcagtaacacgtgactgcatggctgctgaaagctaccagtgaactgttaccagacctgtttcagaataacacatttcctgtaatccactacctagggctttcttgtctcctcatcactttttgcattcgctagttacttttcatatagaataaaatataattacatatacaaatatcacatgaacatattcttaccagaaaaagtatttctatagaatgaagctttttaataaaatactttttcaaaaaaaaaagacacagtaaggccaactgtgcaaaatactgtacaacaaggggaaccttggttctcttactaaactattaaacaaaacaccaactttaaaattggttgcaacatttaatcataacataccataattggaaaagtccagaaaaaatggaagcaagtataattctccttgttctagtctagagttgaaatgtatattatctttatggcaacagtttaaagtccctaccatgtttgaagctgtggcaaatagtttaacagtaaatgtggcaagctggtaacagttaaaaatagcaaatcatttgtattataatatttttaactgaattggataaatcacattttctttttaaaatttgcaattaggataaatggtatttgcaactttgtgaacatacagtattatttaggttttgttttttttgagacggagtcttgctctgtcaccaggctggagtgccgtggcatgaccttggctcaccgcaacctccaactccctggttcaagcctcagcctcccaagtagctgggattacaggtgcccgccaccacgcccagctaatttttgtatttttagtagagacgggtttcaccatcttcgccaggatggtctcgctttcctgaccttgtgatctgcctgccttggactcccaaagtgctgggattacagccatgagccactctgcccagccaataatttaggtttttaaaaacccgttagttgaatagcaactttatctgtctaaagtatacccccgtacattctctcatgtgttaggcttactgtagcagttggccaggcaataacttgtgagcaactctctagcaacatggaaattctgggacagctgctcattgctagtagcttccataaatgtttcttttatttaatatcaatgaaaagatacaaccacatttcacatcatgatgcttaaataaaaatcacatgatgatatatctgattttctatataacttctgagccaattcatcctatttagcagaaaaataattttttaaaaagagactaagaaaacagtaaccaagatgttgaaaaggaaagtgaaagtctcttgccccaattattcattattccagctctttttctttaacctttccaaaagagtttaaagagaaaagaaatggcctatttacaagctaaatatagctgccttggctcaaagaacccaatgacattgttttatgttttttggggagagtgaggtggtatagaagagttttgtttttaaatgctaaaatcaatactttcttctttgaggggagcaaatttgaaatttgctaattttgctccatgagaaaaagtagatattctctagactttttagttggtttttatacaaaatagtcagaagttttaagatctcacaaaaaacatggaatctaaaaaaaaaaatatatatgtattttgtgaacatatgaatttttttaccttggaaatgaagctctaacaccctctttaactaagtactctcaacgcctctgctaagtcacagggcagagaaatgacagaaagggaaagagtacgtctgtgtgtgcacgtggaaggggtgtggggagcacctcagagacaaaggtgaaggaagaggggatgaaagcagcacattcagtgggagtggtgagcactctgcacctgagccagaggttatctccccatgcctccagcaggaagataaatgacttgtctcactctggtacatctgaggcatttcaggaacacattctccaaacaatcaaataattctggctacaaatgtcatcgtgatgagaaggatcaatactggttagtttcaccaaccatctatataacactctattattttcaaatgacatttgattctttagagttgtaagtttttacatttacaaagacacacaaggactagccataaaaatatagacccattgtttgtaaaatgttttcacttgtttaaaaaggtactgtgaaaaaatgaagaaccagccagccgcggtggctcacacctgtaatccccgcacttagggaggtcaaggcaggtgggtcacctgaggtcaggagttcaaggccagcctgaccaaaatggagaaaccttgtctctactaaaaatacaaaattagccaggtgtggtggcacatgcatgtaatcccagctactcgggagcctgaggcaggagaattgcttgaacccgggaggcagaggttgccatgagctgagatcagccattgcactccagcctgggtaacaagagtgaaactccgtctcaaaaaaaaaaaaaaaaagaagaaccacatcataagtttttgatctaaaaatcaagcaaagcggtatcactaggcaacaagaacgaatgtaacacggtggctgggcacggtggctcaagcctataatcccaacactttgggaggctgaggtgggcagatcaattgaggtcagaagtttcagaccagcatggccaacacggtgaaaccccatctctaccaaaaatacaaaaattagccgggcatggtggtgcgggcctgtagtcccagctacttgggaggccaaggaaggagaatcacttgaacccgggagagggaggctgcagtgagccaagaccgcgccactgcactccagcctgggcaacagagcgagactccatctcaaaaaaaaagaactaatgtaacaaggaaaacttcaaatctctcttcaacatgtggtcctagagacaacatacagtctaataagaaaacacaagtaatatattctacattattcagaattttttatgttggtaatgaggtttagagagtaaatcaaatcaaagtttatactgctttatttttctatgcagctacttaggtgcataaagcccattaggaatattaataactaatattaataatatggttaatacaagtcaggtactgtggggctttacatgggttatctcatgtcctcgtcacaatagtaacagtaggtccctaataatagatcattctcattttacagttgcagaactagaaattcagaggccgaaggacttgcctgagctcacacagcgagtggcagccggaagacgaactctggctgctgccttactccactttatcccacagcatggcacaaaaccaaatccaatcttaaggccatcacatgaaaccaaatgtaaaaatgttttgcaatatatacaatcattaagtttgaacatgtttattaattttttttttttttgagacaaggtcttgctctgtctcccaggctggagtgcagtggtgcaatctcaggtcactgcaactctgcctcccagggtcaagcagtcctcttgtttcagacccccgagtagctgggaccacaggtgtgcgccaccatgctcaactaatttttgcgtattctgtagaggcaggcttttagcatgttgcccaggctggtctcaaactcctggactcaagcaatctgctcacctcagccttccaaagtgctgaggttacaggtgtgagccactgcgcttggactgaatgtggtttattttaatttgtatggaagataaaagcttttaaaaagtcacagatagcacaaccaagcacacagattttactatttagattaaaaaacaaaaatatctgtaggccaggactgataaaaaatgaaaacaagaacaaaaaaaacaaacatcaacgaagagttccactaaagtattctggatctactgcagagtagatggggatgaaaaagtttacccaccgcatggatttaaaaatcctttcgaggctgggcacagtggtcacgcctgaaatcccagcactgcaggaggccaagatgggagaatcatttgaggccaagagttcaaggccaccctggtcaacacagtgagacctcatttctgaaaataacaaaaaaactagccgggtgtggtagtatgagccagtaatctcagctactcgggagattgaggtgggaaggttgcttgagctggggaggtcaaggctacatacagtaagccatgactgtgccactgcacattggcctcgggaacagagcaagaccctgtctcaaaaagtaaaaaaaagaaaaaatactttcagttcattttgccaaaggaagagtgattatatttggaagattaagataaatagctaccatcaacgcaacagattggtactttggccaagtgcactaaagttcagttctcaaaacaaaactattttcttgattcatatcagctcattctaatactgctctgctaatgtggctataacaagttcttttgaataaaaggcatcttgtaaacaagataggttcacaatatagacaaaggtgaatagtatatagctagggaaaaacgaaatactttcaagcagggaaataaaaatcacttctcatttccagaaatacacacttaaaaaaaattaggtcacttttaactggaaaaaaatttgtgacaagccaggcacggtggtggctcacgcctgtagtcccagcactttgggaggccaaggtgggagaattaatcgaacccaggaattcaagaccagcctgggcaacccagcaaaaaccccatctcttaaaaaaaaggaaaaaaaaaaaagaaaaaactttgtgagaaattgcaatctcgagtgctcacaggcagtatgaaaactgtgacatgattacatgagaagcatttcaaaggagttcataaaaagttaacaataggccgggctcacgcctgtaatcccaacattttgggaggctaaggcggacagatcacttgaggtcaagagttcaagacgagcccggccaacatggtgaaaccctgtctctactaaaaatacaaaaattagccaggcatggtggcccatacctgtaatcccaggtactcgggaggctgaggcaggagaactggctgagcctgggaggtggaggtttcagtgagccaagatcacgccactgcactctagcgtgggcaacaaagtgagactccatctcaaaaaaaaaaaaaaaaagaaaagaaaagaaaaagtgttctggtgtccccttctctaaaacaaaagcaaatctgaccaattacatagaagacaggcactaaagatggcactgtcctagaaaaatgttggcaatctctttcagctaactggttgccattaaacttctatttttcagaatacattaaaaactgtgttcagccaggcatggcggctcacacctgtcatcccagcactttgggaggctaagacatgcagattacctgaggtcaggagttcgagaccagcctggccaacatggtgaaaccccatctctactaaaaatacaaaaattagctgggtatggcggtgcacgcttgtagtcccaataacttgggaggctgggtcagggcttgaacctgggaagtggaagatgcaatgagctgggatcaggcactccagcctgggcaacagatcaagactctgtctcaaaaaaaaaaaaaaaaaaaaaccaaactgtttccactgatgaaacatcagttgagaatcactattacagttagttttcaaggaggtaaagattcaaactgaacctttaccaagctgaatagtgattaggataaaatgtaccattcacagttagtaaatttactattaaacattgcttaagatcacttatatcgttactataataaagaaagaagaaatggtacaaggatattaggaaagttcaggatataaaaataactacgtgactatcagtgtaacaccaaacattcttaaataaaaccttacatgcacttaaaataatgtgctaaaacttaataggggagtgttaattatttgtatgtatgggtggtggtcagaagaagttgggaatgaaagacaagaagaatgctccacagatgccatgtttgagtgctagtaaaatggtttggtggccagagctgtggactaggagtcagcagattgggactgcggtgtctattctattattatttactaggtctgtgaactgaagcatctcaagggatctttctgagtctccattttttaatctgtgaaatgcggataacagtatatcttgttttgcttttttgtggacctgacacttcaggattctttctcctttttaaatatagcactatatgatcatgaatgtgatagggatttgaaaagtgcaaagcaaatgttgttataaaacgtaagatattaaacaattattataattaaattaaacaattattataattatcaatactatgaattaattttatttttatttatttttgagacaggatctcactctgttggccaggctggagtgcaatggtgctatcatagctcactgcaacctcaaactcctgggctcaagcaatctccttctctcaacctcccaagtaggtgggactacaggcacgtgccactgcgcttggctaatttttaaaattatttgtagagacaggatcttgctatgttggccaggccgttctggaattcttggcctcaagcattcctcagcctgaattaattttctgaagaaagaaactggcacctgttttgggctaataggactggataccccaacttggttggctgcgcatatctgtgaaagataagcagggaacattcaatccaaggagtcctttggccattatgcttttctttaaagtaagctcacaaacctttttcctgggttaggtccacgctctaggtaaagagttctgaaactaaagtctacttttcataacaaaactatttacttgttccatctcttagttgtttaataaacattttcagagaatcataaattattgtgcccctagctttgtttagcaataaaaggtaatatagaaagcagcacagtattttccaattccggaagctttagcaccaagaacccagacatcctacagccagtcaagttttcacccaaaaaaatgcgaacatgaaaatttcaacataatagaatacaagtgataccacctatgtgtgcatgcacacacacttcacaaagttgtattaaaactataagtgtaaacttaaaggaactgacggaaattttaaaaaagaaattaattaaaaagaaaaaaacttcatttttaacgtaaataaacataaagctctgggtttacaagatttggataaaatgtaaccactctgacatctgatcaatttcatcaaaaggaaattaaactcaactttaaaatctctactatctctggctgggtgaggtggctcactactgtaatcccagcactttaggaggctgaagcaggaggatcacttgagcccaggagtcccaaggttacagtgaactatgatcacaccactgcactccagcctgtgtaacagagtgagactctgtctctaaaaaatattaataaagtaagataaaaacctctactatctctaatgttatatataatctttattttagatgggatgaaatatttaacactaatcctagaatcaaaagataaccaataggtttttagcaactcaaagtccttgcttgactatacttatagagaaaatggaccaatcatccaaaagaaacatagtattttacaactgaaagtagcaattctttaatatttaaagcaaatccaaattagcattaattaataaatgactctgattcttttttttttttaagagggagggggctgtcctcactatgttgcccacattggacttgaactcttgaggtcaagcaatcctcctgtctccccagaagctgggactacaggagcttcaaatgactcttgattgtattatatttccaatacatgctgcagtgcaaataaataaataaaaaaaattagctgaaactgaagtttctagaatacttagttggacctcccctttttacaggccaatcatggagctaaatggttactttgttacacagattgagggagtaaatctctgtgttaatgaatacactatcttatcggcttcaagaagagtaacctcaagcacaaaaagaaaagaattaagtctaactgaaggtaccatgattagcaaaaacactttggtttcaggaattgcaaagacagactggccattacaggaagttgtattaatgctgacaatgttaaactgtttacagaaagtaggaagctgtgggatgttcctcccactgtcacacacactgtcctgtcctacgtaacaagtgttgccttatttctcaataagtgaatataaattaaacaaaaaaaaatagttggaaatgactcctagccattttgtcagttttcatccatatctccaattgtatcatccagccaacccctgactcccatctctttattcatctgagttaccaaattatctagctattgtcacataagaaggttttctaaagacagggtaactcaaaagtgcagtggcaggctatgttgaatgtacagccagagtagagtatttcaaatatttaattcagtactaaaacaggccacttcttacaatctattatcctcagtatgctaatttataataactagaaaggtaccttaagttataacgagaatgtgaatcttgtatttttcttttccacagtaagctatttagctgacccatgatggaactaaccaaaaaaggaaatgtttacctttgggaacttagaaagaaaaacattcatgtttacacccaaagttattactaacaaatgagtagtctgctaaaaacctaagctgtgttatcaacaccctatcccttgtcccgaaaattgattaaagggcagttgttcatcttaggcaaaatgttaagtcatgtagggccttaaaacctgtcagtttttaatgtgcattaataagtttaataatcaaatcattagttgaaacgaaaaggttaattttaattttagttattttatctgctaacctctatttcttctgatgtttacctttcctatccaaaattcaaaaatatgctgctaaacataacaaaacacatttcaacccccccaaataaaaattataattacacaagaactgtccacttcctagaaaattaggaaactattatagaaataatccatatttcccagaaggaacttaatgtagaattaaattatattacatattttttaatttttatttttttgagacagggtctcactctgacgttcaagctggagtgcagtggcatgatctccactcactgcaacctccacctcctgagttcaagcgattctcgtgcctcagtctcctgagtagccaggactacaggtacatgtcaccatgcctggctaatttttggttttggttttggtttttggtagagatggggtttcaccatgtcagccaggctggtttccaactcctgacctcaagtgatctgcctgcctcagcctcccaaagagctgggattacaggtattttatttttttagaacatctttgtaattaagaatgtctgaaaaacgaggaaataaaagtgtcaggcactatgctagtaggagagaaaaagacaaactaggcataccaaaggacttctacatgactgacagccacacatgaaagctgtgactctaacacacataatgggtactgtgaggagtgacaggagtaagcatgctagggaaagcaaaggacacggagatctccattctagccaagaagactggagatgcttcaaataaagagacacagcccctaaggcactgttcctggggaaagggagggggcatggagcaaattcatccaaaccacctatggctatttgctgaaaacacagatcactgggtcccatcccagaatccagaatcagatcctcaggtataaagtctgagcatctgcttgtttgttttaacaagcattccagtccatggggtccatgggccacatttagtgtgattatcactacattaagtgaagggtaagacctagtaacagatagggtaaagaataattctggcagagggactacgcatgatgagagctatagaagcaaaaaattagggtatgtgggaatcaagagattacagagtatgtccagtggcctaatgaaatatattgctggaatcacaggtaagctagctagagtctttactcccacaaaaaagctgagctctgttctgaagacaatggtgagccaccaaagctttctgagcaaaccaatgctgtgtttgaacaagactgccttggagtccaagcaagaggtagcagaacacaaaatagaggaaaggagggaatgaatgcaagagacgttacagaggtagaaaaatcagaacttggggagctgctgcatgtagatgagtagatggaattgatgatgactttgaggaaaattttaagtaagccaagtgccttctcagtgcctgacactatgccaagcaccacagcacatccaagagtttaagagtcattaagtcaacataataatggagcatctctatgtgtcaggtgctattaacaatgctgaagccacgcacagtggttcatgcctataatcccaacattttgggaagccaaggcaggaggactgcttgaggtcaggagtccaagaccagcactggcaacatagcaagactccgtctctacaaaaatttttttttaaattagctgggtgtgacggcacacacctgtagtcctagctacttgagagactgaagctggagaatcacttgagcccaggagttgagtctacagtgagctatgatcacaacagggcactccagcctgggcaacagtgagaccttctcttaaaaaacaaaaacaaaaaaacaaaaaacaatgctgagcgtagactcaggaaaaaagaatctctgtcctccagaagtttaaaattaggtcttgctctgttcctcttttcttgtctctacttttcatcatggaaaaaagtatttctggaacttatctctcctcatctttgaggacttctttgctccttaaggatcaactggctcaagtcaacaacaagcaggtcctcatcctgagtggttttacctattcgttcttaatcacaaagatatacttagggatgctttctcaacaatgaggacatgacagtcctgatgtgagacagttagacgtcagcttccaaattaaaaaactgtccatgaaacacaactttaattaaatggacttagggcaaatacggaacttccccacagagaactttcaggtatgcagttctttatttattcatttaatccatatgcactgtatgcttattacagatgaatgtttcttctctgacctggaaggatgaatagagcctgacaaaattgagttgaaagtgtgtggtttgttgagaaaatgaactaagaagaaaggagaataagcagcacttaaaaacaggaggtagatggccaggcacagtggctcatgcctgtaatcccagcactttgggagggcaaggcaggcagatcacctgaggtcaggagttagagaccagcttgaccaacatggagaaacactgtctctactaaaaatacaaaattagccaggtgtggtggcgcatgcctgtaatctcagctacttgggaggctgaggcaggagaatcgcctgaacccaggaggcggaggtgagccaagatcgcgccactgcactccagcctgggcaacaagaacaaaactctcaaaaaaatgcaaaaaaacaaaaaacaggaggtagagtgatgggcgatggaaaggggtatatggaagaactcatgcaagcaaatctaccaaaaataaagtaataaacattgatcaagggacaaaactaaccagaaatctgggaattggatggaggtcatttgtcaagttaaattcatcattttcaacatgcaatactggcagctacgtaattttaacaataatgtgagacagtccctgcctttcagaaataaacacattacttgaaaagacaagatacaaacatgatagaagagaactatacaagacggtaaataatcaaatgctagttgaatgacagatataaaagccataattcagatatagtcaaaattaaggtgtcagttttataaaaagctatcgtgaacactttcctggaacttttaaaaggcaagactgcttctaagtataaataataacagcaaggactgctggttgtacatcgctttgcagccacacccattaatgtggattaatgttggtgacatcatcaaacaacttcctaagcagcttatttattttttttttggagatggagttctgctcttgttgcccaggctggagtgcagtggcacgaactcggcttaccgcagcctccgcttccagagttcaagcgagtctcctgcctcagcctcctgagtagctgggattacaggtgcctgccaccacacctggctaatttttgtatttttagaagagacggtgtttcaccgtgttggccaggctggtttcaaacttctgacatcaggtgatccacccgcctcagactcccaaagtgctgggattacaggcatgagccaccgtgcccagccagcagttttacttttaactgtcacttcattttaatcatattagagtaaaacacttcagatctgaactacctccaaattgcacacagtctagatttctatcactgctggaatctttctgatctttggcaaataaaacccaatcacagcattcacagttaaattacaaaacacttgattaaaaatttgtttcaactgtattctgtatctttaacctggattggatacttttattccaaacctgtcttcaatgctgtgtaacagctacaaagcattttatgggtagtctcgttaaagaaaaaaggggaaaaatgcctggcacaatgccagcaatttgggaggtcaaagtgggcacattacctgaggtcaggagttcaagatcagcctggccaacatggcgaaactgcctctactaaaaagacaaaaattagctaggtgtggtggcacgcgcctatagacccagctacacaggaggctgaggcaggagagttgcttgaaccctgggggcagaggttgcagtgggccaagatcacaccactgcactccagcctgggcaacagagactccgtctcaaaacaaaccccccaaaaacaaaaaaacaaatttctgaggctataattttggatagatacattaaattatggaagtcagtgaaaaaagtgtgctaaaatcagatacaggttgagtgtcccttatccgaatgcctgggaccagaagtgttttggattttgaattttttcagatttttgaaatatctgcatacatatgagatatgctgggaatgggactcaagtctaaactagaaattcatttatgtttcatatataccttaagatatgtagcctaaaggtaattttatacactatttttacacgtagtcattagagactaggacacattaggtctgtgccttagcctttcagtctgttcctccatctcaaatacttttagatttgggaacatttcgaattttcgcattagggatgtgcaacctgtattactaaacatcattaaaataaaaccacacgttttaaaagagcaaatctcttaccagttgaaattctcgacgccggtcataggcattctgtatgccgctgtctgcccataatgctcttatagcaggaagatattgtaagaaaacccttgtttccaccattccttgggctgccatgggggcccgggtatcaaacgacatcatcttatctccatgttgttggtttgagttgtctccccagggaatatgaagcttctctcgagcatcaaccagcaccctcatacctttgtttaaaaagaagaaaaaaaatgtatggagaggagtcattacatattatcataagtttttattccagtattatttccttatacttctgaattaacctagacaaaccttcttcaaaaatgaagaccaacatcgaaaacaaatgtaacttctcagaggttaaaaaaaataacagttgctcactgtcttaaaattagagccttgaaaagcaaatactattagcacaattcctctctctgaaggatttttaacatgttccaatttataaaataacttctaggatagaaggtagtcaaaaaacaatctaactcaagaaagaaaaagaagttatgctgcacagaccaacaatgtccaagctcagaagaaaacagacacaaccaaggttttatgagcctaaaagatgttcatttatgaaacactaagaaccaactactatagctccatgttctgtttgttgcttcggcaccctaacccaacattgagtcttctagcaacacattcaaaatttaaaaacttcttccagcccaagtttcaatccagtttaagttacaggatggccttcaatttccctaaaagggaggaagatcaactgcaaaataatacaaagtcggactccaactcacagaggttagttgaaactcatttttcctatcactgatctattacttttattaagtttgatcaatctgaacagtcacttggctattaggaagtcatctgaataactgaaaaacgggtggggtttttttgtttttgttttttaatagagacgaggtctggctatgtagcccagctggtctggaactcctgggctcaagccatcctcccactttggcctcccaaagtgctgggattgcaggagtgagccaccacgcccagcctgagaaactgttctactgtcaaatttcatgtcaacttgaaaaaactagattcctgatgacttacatcatctcataatcaatgctcaacgtagatcacacttacaactcagtgtacattaagaacgaggtgtttaccaggctcacagtcagttaacatgttgatgctattcattaacataattccttaagttcagctgcatcaggttacaaaggtaccttcaattaaggactgtcaaggcagagtctgcagccttgaaagagaccttaattagttttgagctaaacattacagcaggataaatacaactgttctttatagtttaactgcagaggtactagggctagagctggctgtggtctagtgattctctctaattcattactccataatgcctggctcttcaggcagttttcctttacccaaacgctggaagctcgggaggcggttggcggggagggggcgggggggtgacatgcagaagtcccttatgtacttcctgaacaaaaatcccacttaaaaagacctgcaatctgtagcaaactcctaaactgctccccagataaaataaaatccagatgcacctgagttaccaggcgctgcacctaaattttgccaaaatgccttttctatagaacatacttgacacgcagaaacgagtgttaattatctttcaaatgacaaaataaaaaccatcttttcgatttctttgaatgcccagaaataaacaacttgtttatttttcacttaagaacaaagtttaattttaaaactactgtcaataaagagccgagccaattatctaactcaacactcattcattgtctccatctgtacaggatccacatgacttttaggccagtcttcttactactacatttcatctaaatagaagcagtggtactcccttcctgccagcccccagttacttagcgaaaaggagagtggaacgtgttgcacagaaatcacacgcaaacatcctacctgaccgtgacactggggcgaaaaagcacagatgctacattttcatgctaactgtatgggtccactctctcctgattccagtacagtcaacctgacactcctcaagtttcatattctcgcccaaaaggaggctgtcaccctacgcccttgacaagaagtctcgggcaaaaagttcccttattgcgacggttccagaactcgcttgcttaggagacggccaaggaagcagggagttgggagcgcatgcgaccccatgtgactcgggtcacccagccagggtagcgaggttcggcccacatcgcccgagcaggggatgggggtgaagcggctagggctgctattggtgttcctgcctcatccgcagcggggaggacaggagaggtctgcccacaccccgaggcagcacccagctcgccccacttccctctcgcagggggagagaccaggacgcggtggggggtgggggaatggccgtgacgcccaccggggagacaagcgggagagcagggcgaccccgagcatcctctcgccctggggcgcgagggcaccccgggcgggcagggccagttgccggggcgcgcccccttcccgccagcccgcccgccgggcccgttccttcgccagcgacacagcggaccagggcggtgccccgccccgcacccgccgccgccccagcccccctgcccttaacccccggcccccattcccggcccggcacctttgatcacgttgctgtagatggtggggcggaactcctcgcgcgcgcgctggtcgaagtcctgcccgtggatgatccgcatctgcttcaggaaggtggacttgccgctctcgcccgcgcccagcagcaggatcttcaccagccgcttcacataggtcttttcccgagacaggcatttgtcgatctccttggacttgcgttgctgctcggcctcgccactcgtcagcaggcagccggggaagcacacggacagcacggaccgcgacggcaggaagtccgccatcttgccgccgccgccgccgcctcggcgggcccctccggctccctccacctcctcctccggcggcgggcggctccggcaccgaggctcgagggcggggagcgcggcggcggcccgagcgcgcccagggagggagggaaccagcgaactgactcgcagggcgggccgggcagggcgggccaggacagcgggggagggagggagggaaggagggcgggcccggccccggaggggcggtggccccggagcgtgcgcgctcccgctgcctcccggaggcgcgctcgcacgccgcggccgcttctccgcctcccgccctgggcggcgagtcacgagctcgatgtgtcgctcgggtgcccgcgcccgcagccgcggccgggcgcgcggggagggctgaggaaccgcggtcacgtgggccaggctggggagcccgactttctgtttccctttcatggcctgagcccacttgtgggcagaagggctccttccccaaggccgggaggccggagaccaggtcccggacgcggttctttgggctcccacttagcctccctttctcccgcgttgcgcgcccgctgcccgctgtcaccgcccacccgacccatttcgaggccacggactcgaaagttattcgaacagaacagccggcgtgagcctggcaggcctttggtgcattttctttatttcattttattttttctcttttgagacggagtctcaccctgtcgcccaggctggagtgcattggctcgatctcgactcactgcaacctccgcctcccaggttcaagccatccttccgcctcagcctcccgagtagctgggagtacaggcgtgtgccatcatacccggctaaattttttgtatttatttttagatacaggggctcccccctatgttgcccaggctggtctcgaactcctgagctcaagcgatcctctagcctcggcctcccacagtgcggggattccagacagagccaccaggcccaggcctggtgtgttttcttaaagtgactcccttgaccttctagtctccgaatcccagaacggtaaccagacgtcgtccacccccacttccagctctttctggcattttcagacccctaccagggctctctgtgaggggaaagaactggagttgatgttcacttgagacgtgctaccaggggcatttaatggctcactcgtgcattccacctgggctgtgatgtgacttcagggacgcttggccgcgccggaattagcgagtggcagcaggagggtgaggtcatggtgaaaatcccctacaccggacactgtgatgtaggctcttcccaacaaggaagcagatacacaaacacaacgaggaatgggagcacgcaaattttagctttcctgccagattacagaggatatgacccgtccagggactttttttctgtcctaacagcagattcaggccaggacacctgaaaggaggccaggagacaagccacaagtgacagctgtgggttggcagagaaactgcttaaccgggacccccgagagccgacctcttcattcttagtatttagtttcaagtggaaaaagccactttggtctgtccctgttttgggcaatgcaacgtagctttgggctcctgtggctcagaaacttcgtatgtataagggagcggaggtaagaggtcagcattccaagaaactcccgaacaggtttaaattttaaaatcggtactaatcagttactccctggggttgggttaatgaccgagaagcctcgactcagtagattggctgcagtaaacaatgcctgtagtaggattatctcctgtggctctggcaagcccagagggtggacaacctacaatatacaagtagagtaggctcacctccaatatctgtggattgataagagtcagaatcactgagcagtgctgtcaggcaaaatatatggtaaaagcctgccctggatggagaatttttccatcatctcatctagtgtttgggaggccctgttctctaaccatgcaaggactcgcctctcccaggattggggcatagaacctgtccccgagcactgtttctgcattgaccccaggtgctaatctgaactccaacaaagaggagagaaacttgtaagttaggtagttaacatcttttttcagaagtgtgtgtaatataatggaaaaccaagaatgcctaggaggcaggaaggtattcctgcccagccagttcatgtcgtgacatgcagagcagcagagaaagctgtttaaagccctgcgtgtaagcttgccttggaacaaacttggctcacatcaagtctggctgttctagtcagtgtagtttttaaaaagagacctctttgacctgaaagtcaaatgaaggaagaagaagaagaaggaggaaggaggaaggaagaaagaaagaaaaagaaggccgggcacagtagctcatgcctgtaatcccagcactttgggaggctgatgcaggcagatgacttgagcccaggagttcgagaccagcctggccaacatggcgaaacttcatctctactaaaaatacaaaaattagtggggagtggtggtgggcgcttgtagtcccagctactcgggaggctgaggcaggagaattgcttgaacgtgggaggcggaggttgcagtgagccgagatcaggccactgcactccagcatgggtgacagagtgagactctctgtctcaaaaaaaaaaaaaaagaaaaagaatgaatgaatgaaagaaagaaaaagagacctctttgggtccaacctaggggtttggctgcagctgtccagcttcttctaactggtgatcaagacaccttgtaaattgtaaacataaaaatgagttagagacttggtggtttctcaaagaggtgaacatagaattgccatatgacccagtaattttatcctgggtataccccccaaaatactaaaaagaattgaaaacagtgttcaaacaaaaacttgtatacccacgttcatggcagcaccatttatggtagccaagagattagccggctgcagtggttcacgcctgtaatccaaacacttaagccaggagtttaagagcagcctgggcaacatggtgaaaccctgtctacaaaaaaatatataaaaagtaggggaaggcggtgtgcacctgtggtcctagctactcagaaggctgaggtgggaaaatcgcttgagtccaggaagcggaggctgcagtgagccaaaattgcaccactgcacttcagcctggggaacagagccagaccctgtctcaaaaaaaaaaaaaaaaaaatagccagatgtggtggcacatagctgtagttctagctactcaggaggctgaggcaggaagattgcttaaatgcaggagctcaaggctacagtgagctatgatcatgccactgaactctaagtctgtgtgacagagtgagaccctatctctaaaaaacaagacacaaagaggggaacaacagacactgggacctacttgagggtggaaggcaggaggagggagaggattaaaaaaaaaatacctggtcgggtgcagtggttcacacctgtaatcccagcacttttcggaggccgaggcgggcggatcacctgaggtcaggagtttgagaccagcctggccaatatgatgaaaccccatctctactaaaaataccaaaaattaggcgggcatggtggcacgcgcctgtaatcccagctcctcaggaggctgagacaggagaattgtttgaacctgggaggcggaggttgcagtgagccgagatcacgccattgcactctagcctgggcagcaagagcgaaactccgtctcaaaaaccaaaacaaaacgaaacaaaacaaaaaacatatcgcatactatacttattacctgagtgactaaataatctgtacaccaaactcgagatgagcagtttacctgtataacaaacctgcatatgtactcctaaacctaaaataaaagttaaaaaaacccacaacaacaaaaaaggaatagccaaaaggtgtccaaatgtccatcgatgaacgaatggataaaccaaatgtcgcatatctatacattgcaattattcagccataaaaaggaatgaggtgctgacacatgctgcaacatgaatgaactttgaaaatactaggcaaagtgaaacaaaaggccccatattataaggttccacttatgtgaaatgtccagaataggcaaatccataaaacagaaagcagatggggtgagggaagttgtggggagactgcttaacggtacagagtttcgttttgggatgacgaaaatgtttttggaaatagatagtgatgatggttggagaacattgtgactgtactaaatgccactgaattctacactgtaaagtggtcacatgattaattttatgttatgtgaattttgccacaataaaaaaatgaattggggaaaaaaatctatattatatatttgtaatatatataatataaatatatattttttattttattttatttttaaattattattatttttttccaagacagagtcttgctctgtcatctagagctagcatgcagtggcgtgatctcggctcactgcaacctctgcctcccgggtttaagcaattctcctgcctcagcctctggagtagctgggaacacaggagctgccaccatgccctgctagtttttgtatttttagtccgcctcccaggttcaagcaattctgcctcagcctcccgagtagctgggattacaggcgccgccaccatggcaggctaatttttgttttttagtagaaacagggtttgaccatgttggccaggctggtctcaaactcctgacctggtgatccgcccaccttggcttcccaaagtgctgggattacaggcgtgaaccaccgtgcccagccagaaaaatattttctttaaaaagtcattggcatcatttaaggttgaagtgctcacagtgtgcaacattcaaagaatgcaaatgccattgtgtttatttcaaaataatactaacaattgaaattctttgcaacagaaggaaatctagccattgcttcaggttatacattgcaatcgtattaatgatattttcattttcagatacattgttttataactgaaaaaaatccaaactttttaagggagtataaagtctactagttagaattgaatctgctggatgctctatttccaacagacccagacgttaactcactggaagcgtctgtattgttgccagccagttaatccatatgcaaatagattcagatgccctgtggagctgtgataaaataattgcagctgttgattagttgcaatgttcgtttctttctggaaactcagttcagtgtccgtcttgcaagataaataattaaaggtgtgattaaaaacgaaatacatttccaaatagcttttctcctcttgtcaccttagaaagaaacaagctctttccaacaatactgccagtcttgaaatctatttctaactcttctggaaagataggcttcttatagttacagtttattttcaatgaaaaaaaaaggtcttacttagcttatttgccaatctttgtgccaaataactttgggctgtttacaaaaatcagaatcatccacaaaggacaaaaaatgtgtcaccctcagacatgttcagaagaatgtgccaaaggctctaggaacagttccaaaagaggtgtcaaaaattttttttgatgggaaatataatttaaataagtgtttcccctgccaaggtgactacttactactcaggatgagacaacgcccatttagatgtttatttaaaaatctgtcacattacttgatggttaaaccttgtgttaatccagccttcttattacgaaactctcttttgtctcaccatcagtacaaaataggtggattctaacccttccttacagataaaacaggcgtagacttttcttaccttccatagggaaaggaagggaattcccaagccctcccaaaatacaaatcccttgcatttgtgtcatgttttaaatgcctcaaagcactttgacctactttatctcattctctgctcacagtagcccgactaggaacacccaacattaacctcgctcccatttagcaaatgactctctgaaagcctcattcactgtggccagttgcagagctggaactggaagctgcttagtccagtgcttttttttttttttttttggtaggagataagatctcgctctgttgcccaggctgcagtgcactggcgctatcatagctcactgcagcctcgattctcccacctcagcctcctgagtagctaggactacaggtgtgccctaccaggcctggcaaattttttaatttttagtatgttgccctggttgattttgaactcctgggctcacgtgatcctcctgccttggcctcccacagtgctgggattatagacatgaatgactgcaccctgccccagtgttcttgactttttctgttgttgttgttgtttaagagacaggctctcactatgttgttcaggctggtcttgaactcctggccacaagctatcctcccaccacagcctcccaaagtgctgagattacaggcatgagccactatgcctggccccccttgctctttttgatgtacaaaaattgccgtagtgcccagaatgcccaagtgtatgaatttcaaacctgagacaagtagctaactggacttaacctccaggcaccatagagttcagtactttattatttttccagcccctttcaggctgactgccatcttgaagttccccagctcagacagatcctggtaagatgttctgtactttgaactcaggctctggtttgtaaaatattccaggtggctgatggagaaataagaaaagaggagccaagcttgtttgtttgtttatttgtatgatgcacaagccccacacatttttcacttaccgtaggaagatttaaaaagaaacccttttgtgtgtgtgtgtgtgtgtgtgtgtgtgtgtgtgtgtgtaatgaaatttgatgttgcctttaccagaataagcctctcatgtggaaaattttgtatgaaactagacatgtggaatcaaattggtggtggttttgtttgttgttgttaataaccgaaaacatgactttaattattggttgtattttttctcagcctccaaaaaagacctatgggctgctgttgaccagctgagacctcagctcctccaaagtcagaagctggtactgtcttaaagggacactggcactcctaaaatccttccaccttgcttactgcgtcagataggtttaagggcaatctgtatgtaacactcatcacaaggctttgcctgtaaatctgagattcggaaaaactcaaaacatcgtgctcaccccttctcctttatttttacttacagcttttaaagcagaaggatacatttttagtattttattgcctgtcaatgctctgcgccttgccagaaacggataacgataattttaaattatttatgtgtttatttttatgagacagtttcactctgtcacccaggctagagtgcaatggtatgatcacagcttactgcagcctccaacttctaggctcaaggggcctacctcagcctcccaagtagctgggactacagaccaccacacccgactaattattttttgtagagacaggttctcactttgttgtccaggctggtcttgagctcctggcctcaagtgagcctaccacctcggtctcaaaaagtgctatgactacagaggagagtcactgtgcctggcctaaggatgcttgaatgtaaattctgtttctccagtgaagttcaagttggcagtctcaattcattcctccatgtaaagatcttctgctcacaacccggcagcagacagcagttttctttccctcggaacactggattagcaagcttggacctgccccttccagcagccacactcctggctagcttgctctgtctacaggtagcatcacatgtcatggcctgtagacccggcctttacctcagtgcaaaatgccagggcatgtcctctggttgagtttatcatcgagcagtaagggctcagagggtgctgagaaatggtccatgcagcctttgtcagaccataacacgtgggctcccagtgcaaataatatcataagttttctttaaactcctgtgtcagctgctacagaaaagaaaggcctgctcacgataggattcagggaaaggcagcaactgctgagtcagaatgacagaattaaagggcttagcagatgaggcactgtagctgaggtccctcatttactttgtttatttagaaacagggtcttgctctgtcgccagactggaatgtagtggtgagatcactgctcactgcagccttacctgctaggctcaaacaatcctctttcctcagcctcccaagtagctgtgaccacaggcacatgccaccatgccctgctaatttttaaattttttgtagggatcggagggcgtctcactatgttacccaggctggtctcaaactcctgggctcaagcgatccgcccacctcagtctcccaaagtgctgggattacaggcatgagccaatgcacctggccctcatttgctttagttattagctttctcctggttgtggaaaggttatgccaggcccaaagaggagaagaggagaaaataaaaacaaaggaaggtgctgggtgtgtggcaagcaattgtgtatttgtgattgtttcccctttctttgctcattaacagaactataataggaaaagctcccttaagatagtgagatactgggtgtggtggctcacacctgtaattccagcattttgggaggccaaggtgggaggattacttgaacccgggagtttgagaccagcctgggcaacatggcgagatcccatctctatatcaaatgtatacatatacgtacatatatacatacatatatatatttttaaagatagcgagggaatcgacttttctgtggaaaccagtatggatcatatcagattttttttttttttttttgagatggagtcttgctctgtcacccaggctgcagtgcaatggtgcactgcaacctctgcctcccaagttcaagcgattctcctgcctcagcttcctgagtagctgagattataggtgtgcgccaccacgcctggctaatttttatatttttagtagagatggagtttcaccatgttggtcagactggtctcaaactcctgacctcgtgatctgcccgcctcggtctcccaaagtgctgggattacaggcttgagccactgcacctggcccatatcagattgtttgctattcatttggttttccagagaaggatgtagtacagtggggagaaccccagggagaactcagttaatagaacagagccttgcctttcttatctgtaaactgggagttacacacacagatttattgtaggattaaattacagaacccccaggctcagtgtttgtccataaatgggaggttccgttttaggttttttgaggaaggaacaacaaaacttctttaaaagccctttgaaggtttagcaacgttgtcactgtcagaatgctctctctgtatctttccaaagcccttccttttatgatttaaacatggttgctctctgtctcatgcgcaggctcactcacagccacaggtgtgtccccaaacaggatctgtttctggtggaaagggcctgatgcagcaataagaaaaaaaaaaatgcctatttggggttatatccagaatcttaactctgaagagaggaaggatttactaattcccacaagcctaagcaatcacttcttcagccagagagcagaggttagagtagggatgctggcacagtacagtaagagcaagagcttttatctgagggggtggggggcttgtgcaaaagggggaagaaaaaggagtgggttttgtattcttttttgtttttggagacagagtctcactctgttgcccagcctggagtgtagtggtactatctcggctcactgcaacctctgcctcctgggttcaagcaattctcctgcctcagcctccttagttgctgggatcacagatgtgcgccaccatggccggctaatttttttgtatttttagtagagatggggtttcaccacgttagccaggctggtctcgaacttctgacctcaaatgatctgcccacctcagcctcctgaagtgctggaattacaggtgtgagccactgcacccggcctgggctttgtattctaatctggaaactggacatcataatttcagagggttttgtaggggttatataaaagagcaggctatccatgttaccatgttttcttctatcaaagtgcttattgtccagttgatggactggtatctatgccatcaaggtcatgggcaatggggggtgcctcatgggcatgaatgtggatgagtcagcccgcacgcccatgctctgtgcactccttcacccccagcagctgccactggacagccctcaggcttaggatgggtacatcagtggtgcagtcctccctcagcacagccctacacccagaccttggcccacttgaatgaatagccttgtagtccccggtacctagggtttggtctgaggggaagtacaggctctggtaagtcccttggcattgctccatgtgtaggggtagcaccaggcgaggaccagagcaggatcctctaaagcacaggcgggcaggggcctctgttgcctggagctaagagtggtactggctgggaagacataatgcaatagcatctaaattgcccctgtttgtcaagggctgaactagacctccaagttccaagactctcgaaatggatcccaatagggacactgaatgctcggctgaaacactgcattggattcatgcagtagccagagcttggcaggggactgtctgtgcccttcccgtgggagcctgctgaggctcctgttgtcactctccttctcaagactacccggggcaagaacccaaagggcactttatagaacagcagatacaaaatgcattttggactatccctcagttattctgttaccctggatttctgctaagggaagaaagttaccctcaaggaattaaacacacttcaagaggaggtgagagttctaccctgaggtagggtgtgaagcccttaaggcttttcctcctccatgatttatgagcttagtgtaggcattcagaagagtggaaggtgcaaggtgctcagatttataaagattaatacctacaggccgggcatgggcgcggtggttcatgcctgtaatcccagcactttgggaggccgaggagggtggatcatctgaggtcaggagttcaagaccagcttggtcaacatgggtgaaacccgtctctactaaaaatacaaaaattagccgggtgtggtggtgcatgcttgcagtcccagctactccggaggctgaggcaggagaatcgcttgaacctgggtggggaggttgcagagagcagcctgggggacagagcaaggctccgtctcaaaaaaaaaaaaaaaagaaaagaagaaaaagaaaaagaaaaaattaacacctacttccttagatggttttctaaggatcacagatccacagagactgtgggctaatttgttacaacaattaaggaattgggaaaagggatgctatttaattcctcttgggacaaacactcttcacccaatagactcaccaaggagagcaaaatgagttctgatggaaaatctaaacaaactacatacttaacaattttatgtcttgtttcctgaaagatttgaccctcaatggtcctattcttaattacttaatcattgacataaatgagggaacaaataatagtagtgatcactttatcaataggcagaaacgatgaagtatttctacaatgcctttgcctccatccctcaacctagtcttctcttaacataacagcattttccctttcctttcctttcctttcctttcctttcctttcctttcctttcctttccttcctccttccctccctcccttcctctctctctcttctctctctctctctctccttccttccttccttccttccttccttctttctgcagtggcacgatcttgggctcactgcaacctccacctcccaggttcaagtgattcttgtgcctcagcctcagggattacaggcacccaccatcacgcctggctaatttttgtatttttagtagagacggggtttcaccatgttggccaggctggtcagaataacagcattttcttcggatttttttttttttgacaaattactgtcttggttaattttatgtccatcccaacagtgccagctgtttttcgagttttaccagcagtggtagaaaacacacaaagttctccttgtttttggtttccagttcatcttgccccctctcccatcctttccttcctccccctccctcccagcccttccatccctagtctcctttcccaggctgctcaagataccttgcctctgaggttctacagcatcctcgcttctttccatcacagcacttgtcaccctagattgtaattgtccccttccttgcctaccacaccagaatatgggttctttgaagaaagggacacagctaacttattctgtatcttcagcacctagcatggcatataataaaggcccaatagtgttttttaaaattttttacttttttagagactgcatctcgttctgtcacccaggctggagtgcagcagcacgatcacagttcactgcagccttgaactcctgggctcaagtgatccttgtgcctcagcctcatcacagctcactgcagcctcgaactcctgggctcaagtgatcctcctgcctcagcctcccaagtagctggaattacagttgtgcaccaccatgcctggctaagttttaaattttttgtagagatgaggtcttgctgtgttgcctaagctcgagtgcagtggtatgatcacagccagctaatttaattttttttttgtttttttttttttgagacggagtattgctctgttgcccaggctggagtgtagtggcatgatctgcaagctctgcctcccgggttcatgccattctcctgcctcaacctccggagtagctgggactacaggcacccgccaccaggcccggctaattttttttgtatttttagtagagacagggtttcaccatgttagccaggatggcctcgatctactgaacttgtgatccacccgcctcagccttccaaagtgctgggattacaggtgtgagccaccgtgcctggctaaaaaaaatttttttagagatggggtcttgctgtgttgcccaggctcatcttgaactcctggcctcaagcgatttacctacctcagccttccgaagcactgggattacagaagtgagccaccacacctgggcaagatgcaataattgagcataatttaagtgagtatgcaccatctccaggcaaccacccttcttcctgcatttctgagggttgggagctggatttgctgtccaccagaatgatagggaactatgcaatggctagaaaagagacttttggctcatctctactggttagaaccagagtcctgggtcttactgcatactatgctacctagaaatgggtaaataggccaggtgcggtggctcacgcctgtaatcccagcactttgggaggccaaggagggcagatcacgagatcaagagatcaagaccatcctggccaacatggggaaaccctgtctctactaaaaatacaaaaattagctggctgtggtggcgcacgcctgtagtcccagctactcgggaggctgaagcaggagaattgcttgaacccaggagggggaggttgcacataataccacattgtgggctattaagtggatctaattaaggatgtatctatgttggggtggggatggaagattggggcacaacagcatacaacagacatcagtctagtagcctcctcacagatgggcgagtaggacagtcacgtttccctgtgtaggccagggtaaattagaacttcagccatcaatatcaacaacagatacttcatggattcccactcccattagatgtgagctggggtcagaaagaagtcggctggcattttcaaatcccagctctggcacctcgtgcatctatcggttcctggtcatgacccacctaagttctttgagcatcaattaccttatctgaaaaatggagctaattatgcccacacgtcagggttgctgaaagggttaagtatgataacataagcacctagcaaagtgcctggcccataacaggagtccagaaatagtagcctttgctgctaggtattggagataaaaaatggtaacaatgaagtcattatatacatacaaagattttaaaaaccaacacaaagttgcatatactgagttttaaagaaggtgtgctgatcattgcttcaggaatgcagagaccagagcactgttaacaaaaatacaatgcaagccacctagataattttaaatattctggtagccacattagaaaggttaaaagttcatgtaaagtttcttaaaacttaaaattgtataaataaaaatgttaaaagaaagtgaaattgattttgataatattttatcaagtccaatatctctaaggtattatttcaacatgtaatcaatataaagatcatttaagagatatgagactaagtcttcaaaatccagtgtgtctgggccaggcgaggtggctcatgcctgtaattccagcactttgggaggctgaggcaggcagatcacctgagatcaggagtttgagagcagcctggccaacatggtgaaaccccatctctactaaaaatacagaaattgttcgggtgtcaccacacccgttcctgtggtcccagctactcaggaggcagacccagaagaatcatttgaacctgggaagcggaggttgcagtgagccaaggttgcaccactgcactccagcctaggtgatggagtgagacttcatttcaaaaaataaaaataaaaataaaaaaaacaacaaccagtgtgtctggaggaagaattgtttctgagaaaaccaaagagaaagaaaagaaaagaagaaagaaagaaagaaagaaagaatccagtgcatgtgttttatatttgcagcaatctcagttcagatgtgaaattttcgtcagagatacttcatctgtatttaaatttcataaaatttgcagtagaaaaagtagattcacaaaaccaagctgctccaaatgtagtcatacaatttctagtcagagttaagtatcagtcttaaaattaattaaaattaaataaaaattccaattagtgacactagccacatttcaagtgttcagtagttacctggagctagcagttatttcctgggctagtccatgggaagtgggcaggagccttgaatgattggatatgaggaaaggagtagggaaaggcagatggaatagcctgagagccggcatgcagctggcgtgagcctgggacagtgtggaagccagtttgattaggaccaacaagctgaggctgatgagtcagggtagagtcaaattgggaagggtttggacttcaggttatgaggttagcattttgttctgttgttaaacagtaacccctggaatatttcttttcttttcttttttttttttttgagatagagatctatcacccaggctggagggcagtggtgccatcttggcttactgcaacctctgcctcctgggttcaagcgattctcctgcctcagcttcccgagtcgctgggatacaggcgcgcaccaccacgcctggataatttttatatttttagtagagacagggtttccccatgttggccaggctggtctcaaactcctgacctcaagtgatctgcctgcctcggcttcccaaagtgctgggattacaggcataagccactgtgcccagccaacaggaatatttctgagcaaggggcaggcaatgtgagcactgttttaggttaactgtctggcaccagtgcccgtgaggggatggagaaaacagacaccatccagtgagatcaggttggagatggctgcagtgattcaggtatggggttaaagcacctagctagcatgtgagccaatagaaccattcagaggctttacaaagccatactccaaaggacttagaaaccagccaggctatttagagatagctctttagaggaaagaggcagagagggcaggaagcttggggcctacgtgcctgggagactgggtggacactgaaaagttcaaggaaccagggtgattctgttggttaggacatgactccctaagacagataactgaacccagaccctggaatctgtattttttaattgatttttaaaacgtaaatgtaaaatgtgtaacacccaccccaccctctgaatcacagtgaccctggactttgccctgagtctctgagattgttcagagacactcctttgttctagggaactctttgaggtgctgggtccaaacgggattcgaattaaaggcgcttcaaactcagaagtgagagaaaaaggaaggctaggcagcaacccctgggctctctggcttgctgtttcttaccccgacatcttccctgggaaatgcattacttctaatgtgaatttaggttttgctgtgccttatggaggaggctccgctggggaaattgctcctcctcttcccctcagcttccctaatcttccactcccctgagtctctgcaaagtccagtcaccacacgcagacagaccaggtcaaaagcaagcctcttgggactcagacaggctgcgggcactcagcgactgacccatggactgcgctttctgttatgtaaaacaagcccaacgctgcattgttcagacatatgaggagtgcccaccctgggttgggtactgggctagatgctgggagtaagagtttatggggtgatcacagtcaacctgggcgaggcaaatgtgtcacccagctcctacagtgctaagtcctctgtgccatgatgggggcagggacagctgcccaggactctgacagtaagaactagcctggagcttggcatgagtttcaaaagaagaggaagaggctgggcacggtggctcatgcctgtaatcccagcactttgggaggccaaggagggtggatcacctgaggtcaggagttggagaccaaccaactcctggccaacatggcaaaaccccatctctactaaaaatacaaaaattagctgggcatggtggcttgcgcctgtagtccagctacttgggaggccgaggatccctggaacctgggaggcagccaagatcgggccattgcattccagcctaggcaacagaggggaaggagggcgttctgggctggggaaccatatggggtaaagacacagatgtggaataataatgcaaccataataggatgatgatggcgcttgttgtctgctgagctcttgttgcatgctgggcactgttcaaggggttctcatctattagccttctcattgctcagagggaaaaactgaagctctgagcagtaaaatgcacttgtccaaggtcatactcaaggaatggtgcacattcaaacccataaaagcctgactcatgtccacttctttttttttttttttttttttgagacagagtttcgctctgtcacccaggctggagtgcagtggcgcgatctcagctcactgcaagctctgcctcccgggttaacaccattctcctgcctcagcctcccgagtagctgggactacaggtgcctaccaccacgcccggctaattttttgtatttttggtagacacggggtttcactgtgttagccaggatggtcttgatctcctgacctcgtgatctgcccgccttggcctcccaaagtgctgggattacaggcgtgagccaccgtgcctggcctcatgtctacttctttaagcagcgcagatctgcaaaccactgagcagcctattgggagtactggggaaccccacactggtctacaaaaactaggttttattatggttttgatgagtggaccaaagtcatgaagcaggggtgtcatgaggtacttcctatttctcattggaataaactggaagaattgaacaggtaattctgtgcaggacgtgaaagggatacttaagctattgtcatggctctgctcagcctgcaatatggagccagcagtgtgcaggcagcccccgcccctctcccccagcccccagcatgtcccagcagcttagagccccctggctgggtgggtctgggcaggcgcttcctcccggagctggctgggcaccgctcccagacccaggcttttctaggtcaggcagttctatcttcaggctggcccgaggatacggtttgtgtaaactgcagacattgctggcgtgctgtgtaaacacagactatctcccactgcagcttttcctttggggaggctccccctccagttgggatactggattccaacttcttatcaacttgtgtttcctattctgatataaggaagctattaaagtccctttcctggtattgccttgaccccatcaggacttaacttgtgtggaagcagatgtcctttagagaagtttttcacacacccccgccccccccatccattacccagcctcaaattctccactttaaacaaacctgcaggaatttgttttcaaagccttaggccccgaacatttactttctactccagctagttaaaatgtgttttcttggctttttgggccctccttgatgggtccgctgcttctttcagcttctttcatcttatgtctttttttttttttttttttttttgtgagacaagagtcttgctctgtccgctaggctggagttcagtggcgcgatctcagctcactgcaacctctgcctcccgggttcaaatgattcttctgccttagcctcctgagtagctggaattatgggagtgtgccgccatgccaggctaatttttgtatttgtatttgtatttgtatttgtatttgtattttattttattttattttattttattttattttattttattttagtagagacagggttttatcatggtagccaggctggtctcaatttcctgacctcaagtgatccgcccgcctcagcctcccaaattgctgggattatgggtgtgagccaacgcgcctggcctcatcttcattatttctaaactttttatgcttttcaatgtcagtctactcttcactgcccctaaataaggccttgctcgactctttttaaacatttcctcatatttccctgcttccttcttgcccttctgactgtgacagtcctgtcctccatcctcctttctttccaagttttgctgacgggaggaatatgaagaaaaagaaatgaggaaagacattccttcaagatctagcttatagaccggataataatctgaacatgccctgagccctctaatgttcatttttctccctttcatctgaactcctgtggagctcatggtctctatacacaatttagtactagcagtagccggcctccagggtagccccaatgtgactctatgcctggtattcatgcatacaggtctggtggcatgcacctgtagtcccagctgcttgggaggctgaggcaggaggattgcttgagtcctggagttctgggctgtagtgcactatgccaactggacgtctgcaccaagttcagtatcaataagatggcctcccaggagcaagggaccaccaggtttcctaagggcttaataataagtgccctggccaggcgcagtggcttacgcctgtaatcccagcactttgggagacagaggcgtgcacatcacttgaggtcaggagttcgagaccagtttggccaacatggtgaaatcctgtctctactaaaaatacaaaaattagccaagtgtggtggtgcacgcctgtgatcccagctactcgggaggctgaggcatgagatttgcttgaacccaggaggcagaggttgcggtgatctgaggtcatgccattgcactccagcctgggcaacgagagtgacactctgtctcaaaataataataataataataataataataataataataataataataatgttcccaataaggtctcaatagatgcctgatggtcaggtgcatcccctagctcagtactgtcatttaacaggttgaatgatagtgccattgtggcacttttcacatggaaagatcttagaagttttttcctggcacaagcagaactgctgccacacagaggcccagacaacgacactgcatgaataaatgtatttttttagctagagccatgaggaatcgtatcctgatgggtttacccaaacaggctgctaccaaatgtgaggctggggttgggccacaggatttgacttgtggtcactcatgttccttgatcctctacgctcctatcctgcccattctggggtgctcagctctcaccatggacctggggacattaaaagtcccttccctttattagtcagacacctgcaaaaacctctggcatctatttcacttaacagcacaatcagtcatgttccacgtaaacatcagctcatttcagctcctgtctcctactctgggagttggagctttgagaacctgggaaaaaagaggatgaggagactgtaaaattgtggagtccttgtttaagatgatcactagctgggtggtgctagtgggaccctgataggatgggtggccagcagacccccagctgagtaggcttctttgtgtcattttgctccagcattgacctgaaaactcaacaattgtttttttttttttctttctttctttttttcttagactcttgctatgttgcccaggctggccttaaactcctgggctcttgctctacatattctcagtccaataaaaaaggaaaaaaatatgacagggcatggtggctcacacctataatcccagcactttgggaggccaaggcagtaggaccacttgagggcaggagttcaagaccagcctgagcaacatgatgaaaccctgtctctacaaaaaaatacgaaaattagctgggcatggtggtgcatgcctgtagtcccagctatttgggaggctgagcggggaggatcacttgagcccagggagatcgaggctgggctcgagtaagctatgattgtgccactgcactccagcttgggtgacagagcgagactcgtttcaattaaaaaaacaaacaaataaataataataaaagaaaagagaaaaaaaaattccggggctcaagctctcctcccatctcagcctcccaagtagctgggaccacaggaatgcatcactatgcctgactctctccagtttttttttttttttttttttagacagagtttcactctgtcgtccagactagagtgcaatggcacaatctcagttcactgcaacctctgcctcccaagttcaagcaattctcctgtcttagcctcccaagtagctgggactacaggcgctgccaccacgccaggctaatttttgtatttttagtaaagacagggtttcaccatgttgcccaggctggtctcgaactcctgacctcaggtgatccacccgccttggcctcccaaagtgctgggatcataggcgtgagccaccgcacccggccaccagttgtttttaaaattaattttacccaacattttttgagtctttactacagcagaacccaaggccctaaggattaatatggcaaggtccctgccttccaacgtgttgacatctagcgaggaagaaaagtgtaacatatttctcagatcatcctgaggacctggacaggggagggagagggctgagagcaagggatgagtatggaagttggtggagtccaggtttcaaattggaacatcatggccacagccatttaaatgtgatcctggtggcctgctcagccttctgcatctggaagcaggatgtcaggctggatggaaagtgctgcttttacatcctgttccaagggcttcctggaaagacagaagaaagaaaaagaaagcacaggcacttgagtcccagcccgcttctctccctgcagcagtgagtcaccctgggaaagagtcagtagaacccactagagcatcctgaaacttgacttgtttgttttgaccatggcatgagactggaatatgtcctgggggctggcctgtgggaatgggcacaatagctctaccagtctccttgacacccttcgagatcgcaagcactccacggactcctggtgccttagttgagcaggatttagtgactcaatgcccagcactggaagcctgtggggtgttaggccctgagctgggagctggggatttgagcatgctgaggatcactttcttggggcgggggggctcaggtttacaaattactgcatgtcacagacttatggggtcaccagaggcagttggaagcgtaatttaaaatcagtgactacagccaggcacggtggcccaggcctgtaatcccagcactttgggaggccgagccaggcagatcacctgaggtcaggagtttaagactggcttggccaacatggtgaaaccctctctctaataaacatacaaaaattagacgagcgtggtggtgcaagcctgtaatcccagctactccggaggctgaggcaggagaattgcttgaacccaggaggcagaggttgcagtgagctgagatcgcaccactgcactccagcctgggtgacggagcgagactccatttcaaacaaacaaacaaaacaaaataaaaaaaaacaccaaaaaataaaattggtgactgccacttttttttcttttttttattgcactgagaatatgcagagcaagagcccaggaatttaagaccagcctgggcaacatagcaagagtctgtctctaagaaaaaaagaaaaagaaaaataattgttgagttgtcaggtcaatgctggagcaaaatcacacaaagaagcctactcagtgactgccaggatccacttggcactcccagtagagccccagggggactccacatccagttagtattccaacacccccccacttcccagcgaggaggggcttgagcctccccagatgtatgcatttcctggggctgccataacaaagaaccaaaagctgagaggcttaaaacaacagacatttactatctcccagttctggagcctggaagtctaaatgcaaggcgtcagcagggccgtactctctccgatggctctgggttaagaacgcttcctcgtctcttccagcttcggttgctggccagcatccttgacatctctattcacatggctgtctcctctccgcatcttcacactgccctcccctctctattcacatggctgtctcctccccacatcttcacaccaccttccttctgtatttctgtgtccaaatttcccttgtttacaaggacactaatcatattagatcagggcccccgacctcattttttttcttatatatatgtatatataatgaaaaataaatattataaatctaatataatatttttatttttcttatatatgtatatataatgaaaaataaatattataaatccaataaactatagtcatattaatataatatttaatatattataaatatatagcttatataaatgtttatattatattatataaaaatgttaaatttatatataatacatgatatataacatttacatttatattttatatattataaaaatatcatatattaaaatatatttaaactataaatatatattcaataaatatgtaacaatatgtacatatatgtgtgtatatatatttataaatataattgagatagtgtctcacagtgttgccctggctgatctcaaactcctaggctgaagtgatcctcctgccgcagcctcccaaagtgctgggattacaggcctgagcggctgcacccagccctgaacctcattttaacctgattacttctgtaaagaccttccttccaaataaggcccattctgaagcagtgggcgtcaggacttcagcatatccttctgtgagtgtgggagggggtcacaattcaacccgtaacaccagtcttaataaaactttttttttttttttttttgaaacggggtcacgctctgtcccccaggcgcgatctcggctcactgcaagctccaccttccgggctcacgccgttctcctgcctcagcctcccgagtagctgagactacaggcgcccaccatcacgcccggctaatttttttgtatttttagtagagactggttcaccgtgttagccaggatggcctcgatctcctgacctcgtgatccgcctgcctcggcctcccaaagtgctgggattacaggcatgagccaccgcacccggccaataaaactattcttggcaagacctgcagcaacgtaaaactgtggccaaaagtatgaactgtgcagctagaaggacttggtttgacaccaaatccaaacctcttgccagttttctgaacctggcacatcactgcaacctcggccttctgggtgtcctctaagataaggacaatagtgcttccctcatagtgcttgtagaaaggggtcactactgatatatctagctatctagcacctagaatgccaggatcaataaatattttattaaataaatatatatatttatatccttactttttttttttttaagagataagatctcactctcttacctgggctagagtgcagtggtgtgattatggcttactgtagccctgtagcctcaacctcttgggctcaagtgatcctcctgtctcagcttctcgagtagctgggactgcaggtgtgtgataccctgcccagctaatttttaaattttattgtagaggtggaatctcactatgttgctgagcttagtcttgaactcctggcctcaagtgaaccttctgcctcagcctcccaaagcactagaattacaggtgtgagccaccacatctggcctagtcctttccttaagaggcactctatgggcagaaaagacaatacagacctaaacaagaaattataatatatcatgatgtcataaataatggaaataccaacaaaatacagtagaagcagaaaggaaggcctgggggacttcccagaggaggcaacatctggagaagggttttaaaggttaagcaagagtttggcaggcataggcatggaggtggaaaacaatagggccccttccgggcatcataagcaatctggcattataggactataaagcgcaagagaaggagaggtgggagatgaagtggaaagagcaagcaggaaacagatcataagtggcttcaggtgctcttcaaagaagcacaggctttatttgtctcctgtgggtgacgaggaggcatttcaaggcttggaaatatcaatcaagtcccagaagaaatggataacacactgaatctgggcaaccaaggagagtttaataaacggaccatgaataaagacttgagaagggctgggcaaggtggttcatgcctgtaattctaactttggaaggccaaggtgggaggattgcttgagccctggagttcaagaccagcctgggaaacatagtgagaccctcatctctaaaaattaaaaagaaacaaaaacaaaaacaaaaaaactcagctgggtgttgtggtacacacctgttgtcccagctacttgggaggctgagttggaaggatcacttgaacccaggggtcgaggctacggtgagccatgattgtgcaactgtactctagcctgggcaagagtgagatcctgtctcaaaaaaaaaagttgggggggtggtgcgcggggggattgagacgtgattagggaaacaacaaagggcggcgcagtgccccagcagaaccacagcagggaactcttactgcatctaggctggaagcagcaagtgaaaagagtgagaaccagaatcccgtagctgtaggagtggccacctcatggacatgggctttggtagaggaaggcagctaccaataaccctaggagctcagtggttagatgcgccaacctcttcccaccctccagtcttcctgacccagttggaagtccaagagcaaagaagtccaggtgacagggtctatagaaaccagctactaggacatcaggatggaagggtggagatggagaggacatccggagaagcaaaggaaagctgtccagctcagaggtctgctggtggcttggcggaggctgggtgtagggaattggtgatagcctgacaagagaagctttgattctgaactcaagcctctgagaaggtttggaaaggcaaggatggagctacaagaaatttaggagggagaattgaccacataattatagaagatgagtgaaaaggaagagcctggaagtctagaagtttagggtttgggtaaaggcatgagtgttgatgctgtcaactcaggaagagaaatcaagagaaagagaaggttttcattttgctcaagggcatggaggcgaaggtaggggagagtgtgatgctaataagctcagtttgggacttgttgaggagccagagagacatcctaatcaagatgtccccaggcagttggcaatgtaggtctacaactgtactgtccaatacagtagccactagccacttgtagctattgatttttttaatttttaatttttttgttttctttgagatggagtcttgttctgtctcccaggctggaatgcagtgatgcaatctcggctcactgcaacctctgcctcccgggttcaagcaattctcctgcctcagtctcctgagtagccgggatcacaggcacccaccaccgcacccagctaatttttgtatttttagtacagatgaggtttcaccaggttggccagggtggtctcgaactcctgactttgtgatccacctgcctcagcctcccaaagtgttgggattacaggcttgagccggccctgtagctattaaaattaaaattaaataacatctaaaactcagttccttaaacacactagccacattccttttctctttctctttttttttaatatatagagatgaggtctcactatgttgcccaggctggtctctactcccgggctctcacttcaacctcccaaagtgctggaattataggtgtgagtcaccatgcctggccattaaccacattttaagtgcccagtagccacatgtggctagtggctaccatattggacagcccaatttatagaacattttcattattacagcaaggtctattgcacagcacttgattagaagattggagagtaggtagggctggaaaggagagacttggaggtcatcaacacgtaagggtggttaaccatgatgggatgagtgaggtcagcttgaagagcacgaagaatgagaagacagatggactaagagtgaactctttcatgtcctttgcagggacatggatgaagctggaaaccatcattctcagcaacctgtcacaaggacagaaaaccaaacaccgcttgtactcactcataggtgggaatcgaacaatgaaaacacttggacacagggtggggaacatcacacactggggcctgtcatggggtggggggctggaggaggtatagcattaggagaaatacctaatgtaaatgacaagttgatgggtgcagcaaaccaacttggcacatgtatacctatgtatcaaacctgcatgttgtgcacatgtaccctagaacttaaagtattaaaaaaaaaaaaaaagagtgaactcttgcagaacacacacatttactgggcagcttgaggagccagcaaagaagaccaagaaacagctatcagatgaagactaagaactagaatagagtcatgtcccggaaacccaggaagagccatcaagaagggagaggtgagcagtgtaaaatgttgcagatagaacagaaaagggggagcaggcacagtggccctcttttgtagagctgcaaatcccaacactttgggaggctgaggtgaccagatcacttgagcccaggagttccagaccagcctgagcaacagggtaaaacctgatctctacaaaaaaataaacaacaacaacaacaacaacaaactagctgggagtgaatggcacacacctgtagtctcagctaaccaggaggcagagggaggatcacctgagcctgggaggttgaggctgcagtgagccgtgatcatgccactccagcctgggtgacagagtaagaccctgactggggaaaaaaaaaaaaaaaaggaatgcagggtgtctcttgcagttgacatttggcaggacatttgtgaagagagcagtttaaatgaaacagggatgggaccaattccagattgccccagattagggagtagatgggaggagagcaagagacgaccacccaccagaagggacagagaagggccgaaaacagatagagtggtagcaaacagatataagtgatagctgagggcagggaagggaggaccacatttttttaaaagatagaaaaggtggccgggcacggtggctcacacctgtaatcccagcactttgggaggttgaggcaggcggatcacctgaggtcaggagttcgagagcagcctggtcaacttggtgaaaccctgtatctaccaaaaacacaaaaattagccaggcgtggtggcaggcgcctgtagtcccagctactcgggaggctgaggcaggagaattacttgaatccggcaggcagaggttacagtgagccaagattgtgccactgcactccagtctgggcgacagagcaagactctgtctcaaaaataaataaataaataaataaataaataaataaaaataaaggatagaaatggctttagcatatttatagatcaaaagaatagggatgggcaaggtcaaaaaggagacaggaggagagcacacacaactggagggggtggccttgaagaggaaagagatacatcgccctctaacaggggcagatgaagatgcatttgtggtgggggaggtagcagtcaaggctgccagctgcttagcttagcaaatgcattgtcagctgccaagaatgagaggagtggaggcttggtcaggagcttgagaagatgggctaatgtgtgagagccgcagagggagctgccaagttcaagagggggatgaacagtttggggaccccaattggacggtgagccttgggagtgtcctgatgtgatgtcacagttacgtttcgtgaaacgcaacacagatggtcccgtacctgggggactggagggtgaatcttcacaccagggtgggaggacccgaagagtgaaggagatggaatttgaaactccctgtctaaagaaagaaagtggaacttgtggaatagtaaacaaaatccttgcaggtgctcccgttttcatttcctttgcatatcctggctcagtcatcttcctgcacccttgcagatgttgccattcccaggaaaatcaggggcagagagcagcatgggtgggaactggaaagtccctgccgtggagggtcttggggggatgcaccggctcctgctcccccatctgctgctcacggaaggagacgcctgccggaagcacaaggaggggctgggggtctggaaggctgagcttgagtcacaggaacactagggatgccaagacccctcgggaggtcttggtggctggtgtctctgagggccatcagctggtgtctctttggccgaagcagcccaggcagggattgggaaaggttaggagtgtggactccagaaccagcctgccgagggcgaaactccagtgctgccacttaccattcaaagctacaggacccaggcgagtgatttaaagcctctgtgactcagtttccccaagtgacttaaagcctctgtgactcagtttccccatctctaaaatgtggatcataattgctgcttcctcatagggatgtttttgtgagaattaaatgaattgaaaggtggggaccccaaacacccagtaaaggtggggtatgatcctttagctcatggctgagtgcctgccactgggaattcagcttgggttgtctgagtcagaggggcctggcactgaaccccagccctccacccagaccactcaggactcccttaagatcctaatgggtgtagagtgtgcctgcctttccttccttcccttcccttccttctctttctttctttccttccttccccttccccttcctgttctcccttccctcccccccttccccttcccatttcccctcccctcccctcccctccccttcccttccctttcctttgcttcccttcccttccctctttctttcttttccttccttcctgagacaggggtctcagtatgttgccctggctggtctcaaactcctgagctcaagcaatcctcatgccttggcctcccaaagtgctaggattacaaacatgagccactatgcctgtcctacacttttatttctgataaaggctaagtgaagaccttagcttagtctgagagccaaatgggcctgcctaaagttagagtggggtggactctcccacctggtcacagccacgctggccccaggcgggggctggcctagggtggagtaatgcagaatagatgctgcctgcaggaagctcagtgcctaagaggaaagccattcatattaatatgttatatattcatgtattatatataaatttaacggccgggcgcggtggctcacgcctgtaatcccagcactttgggaggccaaggtaggcggatcacgaggtcaagagaacgagaccatcctggccaacaccgtgaaaacccatttctactaaaaatacaaaaattagctgggcatagtggcgggtacctgtaatcacagctactcgggaggctgaggcaggagaatcgcttgaacccaggaggcggaggttgcagtgagctgagatcacgccactgcattccagcctggcaacagagtgagactctgtctcaaaaataaaataaaataaaaaataaaataaataaatttaacagtcatatataatataatataaaaataatatttatataaactatatatttataatatattaaatattttattaatatgaatatagtttatattagatttataatatttatttttcattacatagttcttcccaaatgtattaatccagtgagtcattccatctcttctagggcccagccagcaaaggggcaaagcctcagcagttgttgcggggagggcagactcaaagaagaaaaagggaatggggagcaagccttctcctaacactcagctactccatgtctcttatgtctattctacaaacacttttatgctacacttggggcagggcgttgcaaccagtataatggttcggcaatggactttggagctggactacccaggttttgaatctgaccttcgctacttcccagttctgtgccaagtccacacctacctccagattctcacctgaacaatgaggaggctatcaccatatccccctcaggggctggtcatgaagattaaatgagtggtctttaaatgaatgttttacagatagactctatgagtgtttgttattacccttgctattaaatgaaaggccttgagggcttttttgttcctttgttttgctttttgttttttgagatagggtctcactctgttgctcaggctggaatgtagtggcgtgatcttgactcactgcagccttgacttcctgagctcaagtgatcctcccacctcagcctcccaaaaagcagggaccacaggtgtgtaccaccacaactggctaattgtgtttatttattttttgtagagatgggggtgtctcactatgttgcccaggctggtctcgaactcctgggctcaagtgatcctcctgctttagccccacaaagtgctgggattacaggcataagccaccacacccagcccatgaggctcgctgcagcctttcttttgaagagggaaaaagcaaatttccagctctccagaaagaaaaaggacctcatgccaccttaagtaaaggaatttaaatgacgtgtctgtgcctccatggacagtggacagctgagcttcttcagggctggaacccagcaggcagaaacggaggctcctggggctgtgtggttccccatctctggcctctgcatttctctctgaatcttattcttttgtatattgatggaggaactgctgtatcctaggtatggagccaagtgctgggaagagagagtgaataataaaatctctgccctgaaggcactgacaagccaatgagcaagacagacactatggagaatcacataaaaatcatccgtgttgcagcatgggtcagaattttcttccttttgaagggtgaacgatgttccactgcatgtatataacatgttgtttgtctagtcatccattgatgggtacttgggttgcttctgcctttgggctattgtgaatcatggtgctatgaacatgggtatacatttaaccttttccttttacaagtgaaaaaaaaaagtacagttaaggaaaatggactaaaaagaggcataatagaaggatctaacctaatagggggagagagggaaggttttcccttgaggaagttctattttggctggagcccaaaggatgagaagttagctgggtaaaaggtaagtgaagaatagttttggccacacgtaagagcctcgaggcaaaaagaagcttagattgttccagaaatggaaagggagcagtgtgactggggcacagaaatccttagagagaggggcatgggggggatccttggggtgggcagcatccagattgagggatcattcaggactcattacaaatgggctgttttctaagagctgtggtagacaactgaagccctctaagcagaaaagtggaatgtctaaacatagagttaaaaaaaaaagttgctccggccacagtggaggaatgaattggaagctagaaggaggtgtggggcaggagcaaatgcgggaagaccaataaggcaccatgggagttgcccaggcaagagatactggtagggtgggtggcagtgaagatgactgaaattgatgtattaaagaaacattaaggagacagagttggttaatttaatgattgattggctctcaggagtaagggagaaaggggtatctggttgaatcccaggtctttgcgctgagcaagtgagtaggtgttggtattatctgctgtgataggaaacagttaaggagacatgggctgtaggtgcatagaaattattcactcggttttggatatcacaaagttgagatcccaaatgacatgagaggttatggtgttgctgggtagacagcattggacacccatggctttcagaaaagaggtcttgtgtgacatgagatacagctggaaaggtagactgggccatgtttaagataataatagcacgcctgtaattccagcactttaggaagccaaagtgggcagttgcttgagctcaagagttcaagaccagtctggggcaacatggaaaatccccatctctacaaaaaatacaaaaattagccaggcatggtggcacgctcctgtagtcccagctacttgagaggctgaggcgagaggatcacttgagcctgggagtggaggttgcagtgagctgagatagcactactgcactttagcctgggcaacagagcaagaccctattgcaaaaagaaagaaagaaagaaaaagataacagtagccaacattcaccaaatcatcaatatatgacagataatatcatttttcatttatagatgaggatgttgaaacatggagaggctgtgaaatttacccaaagtcaaacaactcataagtggcagtgctgggaatataaaccctgacagtctggttattatgtctcctgttgaaccgttctgtgatcctggaatgctagaagagcaggtctgcccagcctaaccttttccttttataagtgaaaaaaaaatcatcaaggataagttacttgcccaagatcaccccagctattaatagttatggcagacatgaggctataatccaagtcttctgactctcagcacatccctttctaccatacattcaatttcacatcttttacacttcttttcccagattcattgtttttagagatggagtcttgctctgttgtccaggttggagtacagtggcaaggtcatagctcactgcagattttaactcctgagcttgagtgatcctcctgtctgccttctgagtacctgggactgcagatgtgagccaccatgccttgtgtagatattattacatttgtaaaaatttgtgtttctttgttttctaaattttcagtaggggacatgtataatattcatagtggggaaaaagagacttgcaaaagcagagacatcaatattattaaacagaattcatctgactttggtctaaaggaggcatgtggggtatcagaagacaggatggtgttgccatatttgtctttgataatttctagcaagtgtttctgggaaatttctatcattgcaggaactccattccttaggatggaaaggaggaaacatctcttattgtagggtagcatatggaggaggtgaccaggaggtctgtcttagggcaaatcgttctccatgaaatccctaaaacccactctcctccccactcctcccttcctcgcctgctcactggcccaccttgcctggaaatgatggaggtgcagggagaagaacagagttccaggcttgcgggaacaagacacccttttactgtcaagcaaagccaattgatttagatggagagaggtgctctaagcaaagtgtttacattttcaaacaaagatgcaaaagaatgtaaggataagaaggcgcaaggttatcaaagctgactacacttcctcagactgttctccctctagcagatgtcttggaccaatgtaaaacaatgtagattcaaaaaatcagtttgatatagttacttatcttgaaaactgttgagattgctccttttcgccctttttttacctaccttgtccaattcatcaagctgtcttccacttattattcaaacaggatatatttagtttatttatatcccaagtcattctaaaaaaaaaaaaagttgttgtggcttaccaatagataaaagcccagataataaaagccaattgtataggaatcaaaataggaaaagagtggagaaaatactagaaatcaaatgtttattccaagggagcctgatggcagatctgaagtgatctgatgatcaagatgaaaaaagaaacatgatatacatctctcttgagcagagaaacattttgagtttttttaaggaaaattaagtttttcttggtacaaaactttgaaagaaatttctcctattatacatggtagagagatagaatgggtaattctttgacaaaagtgtttgaatctgatttggtatcaaatcacaattttttttttcaaagagaaattcacacaactaattcttttttttttttttttttgagatggagtctcactctgtgtgttgcccaggctggagtgcagtggtgcgatctcggctcactgcaacctctgcctcccaggttcaagcgattctcccacctcagcctccccagtagctgggattacagccactgcgcccagctaatttttttgtatttttagtacagactgggtttcaccatgttggccaagctggtctcaaactcctcacctcaagtgatctgcctgcctcagcctcccaaagggctgggattacaggtgccagccactgcaccaggcacaactaattcttataatgattttagataacagtgggaaactgtaacactgaactttagcccagagatgctgattcacagtggagatttgatcagttcttgaaagcacgatagcttacgcttaggttggcaagaacttttggaagcaaatcctattttctaacgtgttagtcattctttccatttgcatctttgtttgcaaatgtaaacagtgtgtcatcaatgttgttatctaaatcattttaatttttaacaggaggcagttttgggtgaatcctgtgacatgcttctagagacctatctctacccctgtgatgatgattaacaggaggaattggggttatggtcattcagatacaaatcacttaacttagctctcatctggtacatgtatttatttatgttgtgtctctgtgtctcttttctttttgagacggagtcttgctctgtcgcccaggctggagggcagtggcatgatcttggctcactctaagctccgctcccccaggttcactccattctcctgcctcagcctcccaagtagctgagactacaggcgcccgccaccactcccggctaattttgtttttgtacttttagtagagacggggtttcaccgtgttagtcaggatggtctcaatctcctgacctcgtgatccacccacctcggcctcttaaagtgctgggattacaggcatgagccaccgcgcccagccgttgtgtctcttttcacaagtgagtcaacaaggcatttaggagatgcatgaaataaaatgataaagtataaattaaaaatcggtacaagaaaaacaaattaaatatggagtcaagaccagggtggatatagggtgaggttggagagaatgaagatataaaggcaataaacttctactattgcttcaagttggctgcaaattggctttgggcttcctagagggaagggggcaaagttcactttttcccctctggtctgaaaatggtgaagccccatctctactaaaaatacaaaaattagccgggtgtggtggcacacgtctgtaatcccagctacttggaggctgagggaggagaatcgcttgaacccaggaggcagaggttgcagtgagccaagatcgcgcccactgcactccggtctgggcgacagagcaagactccatctcaaaaaaaaaaaaaaaaaaaaaagtcccattgaaacataactgtactattcttctagtctgtagcctgttaccatcatgaaaaactaagttactctttttcacccagcccccagtggctttcccttctgtgttggctcctttttttttttttttttttttttgagacggagtctcgctgtcgcccaggctgcagtgcagtggcgcgatctcggctcactgcaggccccgccccccggggttcaagccattctcctgcctcagcctccggcgtagctgggactacaggtgcccgccacctcgccctgctaattttttgtatttttggtagagacggggtttcaccgtgttagccaggatggtcttgatctcctgatctcgtgatccacccgcctcggcctcccaaagtgctgggattacaggggtgagccacggcgcctggcctccttctgtgttgattcctaaagaaaaggggtttaattggctcataattctgcaggctgtacaggaagcatggtgccagaatccccttcaattctggggaggcctcagggagctttcactcatggctgaaggcgaagcaggagcagatatgtcacatggtgagagagggagccagagagaagggagaggttctagacacttttaaacaaccagatctcacgtgaagtaactgaaggagaactcacttaccaccagggggacggtgctaagtcatccttgagaaatctgcccccatgatccaatatttgccaccatggctacctccaacgttggggatcacgtttcagcatgagatttggaggggacacgcatccacaccacatcaacttccatttctaagagctctcggggcatctctgcagtgctctgtgcttctgttccattctggaacagaacattctgcttctgtttctactctgggctttcacggcctgctcagcgttcacttccctcataattttgctctcatgtggctttgcctcaccatgggtctgattccacccttttcaaatttgtccacctctaccaactggctcaactggctacttccaagagtgatcatatagttgattggtccaggtcatcctttttttttttttcttttcttttgcagggtctctccccatcatccaggctggaatgcagcggtgcaatgacagctcattgcagccttgacctcccgaattcaagtgatcctcccacctcatcctcctgagtagctgagattacaggcatgcaccaccacacctggctaatttttaaaatttttttttgcagagacagagtctcactgcgttgcccaagctcaggtcatccttttatacctggctgtgttacaggttgatagccagtctatgagtcaagtcccatggtccaaaatggaagctaagggattgggtgggaatgtgaagggagctgtggatgaaaccagtttctttgcaatgaagtttaaggatggcaagacatcatctgttcatctgggagagggattgagcaggagcatgggaaaacccgttgccctcttgcctctattgcaaataaatgcttttgtctttctgaaaaacttttcttctgagttgcttaagtcattctatttggaagtatgttagaggctttggggagctctgcactaaaaaataccccccgctttttttttgagacagaattttgctcttgttgcccaggctggagtgcaatggcatgatcttgcctcactctgcctcccaggttcaagctattctcctgccttagtctcccgagtagctgggattacaggcacctgccatgtccagctaatttttgtatttttagtagagacagggtttcaccatgttgcccaggctggtctcgaactcccaacctcaggtgatctacctacttcggcctcccaaagtgttgggattacaggcgtgagccaccgtgtccggcaataatcctttttaaatgtattaaacacatagacttctgaatgtgtgtggctataatacacccccctgtaccccatttcttatatttctttatttacatcagctgttagtagctaacatgctattgcttttacatcttgctactcagattgaagttggcttgggcatcacctagcagcctgttagaagtgcagaatctcagcctcaccccagaactactgcatcagaaactgtacttaatatatttatttactaaatttaaaaagttttaattattttaaaatagctaaattaattaatttaatacatttataaatttaaactaataaagttaattaattaaattagaaatttacaacttatacaaaaattaactcaagatggattaaatacttaaatgtaaaacccaaaatcataaaaaccctagaagaaaacctaggcaataccactcaagacgtaggcaagggcaaagacttcatcacaaaaatgccaaaagtaattgcaacaaaagccaaaattgacaaatgaggtctaattaaactaaagagctctgcatggcaaaataaattatcagagtgaacaggctacctatagaatgggagaaaatttttgcaattcacctgtctgacaaaggtctaaatccagaatttacaaggaacttcaacaaatttacaggaagaaaataaacaaccccatcgaaaagtgggcaaagaatatgaatagacacttctcaaaagaagacatttatgtggccaacaaacatgaaaaaaagctcattatcactgatcatcagagaaatgcaaatcaaaaccacaatgagataccatctcatgccagtcagaatggcaattattaaaaagtcaggaaacaatagatgctgatgaggctgtggagaaataggaactcttttacgctgttggtgggactgtaaattagttcaaccattgtggaagacagtatggcaattcctcaaggatctagaaccagaaataccatttaatccagcaataccattactgggtacatacccaaaggaatataaatcattctactataaagacatatgcacacatatgttcattgcagcactatttataatagcgaagacatggaaccaacccaaatgcccatcagtgacagactggatgaagaaaatatggcacatatacaccatggaatactatgcagccacaaaaaggaatgagatcatgtcatagcagggacatggatgaaactggaagccagtatcctcagcaaactaacacaggaatagaaaaccaaataccacatgttctcactcataagtgggagttgaacaatgagagcacatggacacagagaggtaaatatcacacaccggggcctgttggggagtggggggtgaggggagggaactcagaggatggatcaatcggtgaagcaaaccaccatggcacacatatacctatgtaacaagtctgcatgttctgcacacgtatcctgtttttttttttttttttagaagaagaaaaaaaaaatagggatgaggtgttcatctggcttgagaccagccatgttgcccaggctggtctcaaactcttgggctcaagcaatcctcccagctcagcctcccaaagtgctgggattacaggcgcgagtcaccatgtgcagcctatttatttttgagagaggttcttgctctgtcaccgaggctggagtgcagtggcttgataattgctcactgcaaactcaagctcctgggtacaagctatcttctcacctcaacctcctgagtagctaggactacaggcacacaccacagcatctagctcctatttttattttttgtagaaatggaggtctcactttgttgcccaggctgatcttgcactcctggcctcaagcaatcctcccgtctcagcctcccaaaatgctgggaatacatgcatgagtcactgcacctagcctatttatttatttttgagacagagtcttgctctgttgcccaggctacagtgcagtggtatgattatagctcattacaacctcaaactcctggtcacaagagatcttctcacctcagcctactgaatagctaggactacagacgcacaccacagcatgcaactcatatttttatttttttcatagaaagggaggtctcactttgttgcccaggctgatcttgaatttccagcctcaagtgatcctcctgcctcagcatcccaaaatgctaggattacaggcgtgagccactgtgcccggccagaatctgcactttaacaagatcctcaggagactaacatttgcattaaatgttgagaagcattgatcttagagcaaacttgggaaacactgaacaagtctgatcagtgaatgtggctcggagaagtaatgtgccttgtctaagctccctaattagccagtagtagatctgggattagaatccaagtgtcacgagtcctagtcatattaactttccagcacaacatgggtgtctccctcatctagaaaacaaggaggcctgatttggtcattgttagagaaggaaattagcatgtgattggggtgaccacataagttatcatcaaaacatagttgcttttttgttttattttattttattttaactataaaataattttctttactagagacagggtcttactatgttgcccggctagtcttgaacaccttggctcaagcgatctacctgtcttgacctcctaaagtgctgggatgacaggcatgagccactgtacccagcctaaacatagtcacttctgagagtgcaagagggcaccattagctatttcaggacaataaatgcaacctgacataagtggtcactctatatacctaaagatatttctagtttacagggccccttcatatttgttaactaaactgcataaatatctgatgacaaaataattttaaagttctaacttttatttatgtgtttatatttatttttgagacaggatctcactctgtcacccaggctggagtgcactggcactattttggctcaccatggtctctgcctcccaggctcaagtgattctcctgcctcagcctcccaagtagctggaattacaggcatgcaccactactgcccagctaatttttgtatttttagtagagatggggtttcactatgttggctaggctggtcttgaactcttgacctcaaatgatccaactgcttcggcctcccaaggcactgagattacaggcatgagccatcatgtccaacctaaagttctaactttcaagtaaaacctggttctcaaggaaaaataatacatgtatctcattataataataataaaaaaattaacctcattaagaataaaagaagctgggcgcagtggctcacgcctgtaattccagcactttgggaggccgaggcgggcagatcatgaggtcaggagatcaagaccatcctggttaacaggctgaaaccccgtctctactaaaaatacaaacaattagctaggtgtggtggtgggcgcctgtagttccagctacttgggaggctgaggcaggggaatggcatgaacccgtgaggcagagcttgcagtgaaccgagatcacgccactgcaatccagcctgggctgcagagcgagactccgtctcaaaaaaaaaaaaaaaaaagaataaaagaaaaaagagagagaaagcccaaattagcaaaataagagaatatgggaaccaatcacagatacatacaaagttgaaatgattttgaaattgctttgctgaacccattcaactaaatttgaaaacctggtttccacgttgtcattcaccatggctgtggccaagctagggctggaagctacatctcatggctttctgcctagtaatttccctgtgagtcaaccagacttcagagtctcatttctgaaacttttattccagtactctaacctagagctaagatgtctttgtagcttggtgggaacgcggctcttccatgggaatgagacacagatgatctgaagacatatctcctgagcatacctcttatgataaatgcccacatgcctccatctgacatcagctttgtctgccatgctcaggccacctggctctagaaataaaagatgggaacgtccctgatcctgaatgttaaacctggaaaatctcctcctgccagagatgtagctagcattccatatttaaactatctttaaagattttaatgttgacaatagtaacaacaactggtatctattgattctttactcctttgtcccctatcattgtaccatccccattttacagaaatcaaagcacagaggggttaagtaacttgcccaaagccacacagagagtaagtaatggagttgatatttgaccccaagtaatctgattccagagattatattttacctccaattatgactccaacagttttcatattattttgagaattctgagaattattctcagaataatatatatatgtgtatatattatatatacatatatatatatatatatgccagactatgtatataatgtatatatgtatataatggaaccactacgcctagtaaattgttttttttaaggtcccaagagacataggagagaaactattggttactggacattcaccaagtgtcagtcatagttctaagcgcttgtacatgaatcagctcagtaatcttaaaaccaaaaccagaaccaaacaaaccgccgcccaccccctggggagagtgcagtgattctcactcatcagatgagacaaaggaagcccagagaggttccataacttgcttgagatcctacagctaggtggcaaatccagggctcagagccagcccatttggcccgtgagcagcattcttcaccaccaagcacaccccactgccagtctttaacccagttattcattcagtcctcacagcacatgatcgacaggagtcatttcctacccacttgcttttctcgggttagatggggtaactgacgctgataaagtttaaatattaggttggagcaaaagtaattgtggctttgccattttaatggcaaaacccgaataatttgcttagtgccattcaatgacttggggctggctagccagggagccaaagcgtgttgcatctgttttcacttccccaggccttagtggtgcggtctaaggctcgccctctgccacacatcctcctctccctcctcccggcagctcctcctcctcctcgtccacctccacctcctcctccaccccctctccctccacctcctcctctccctcctccttttccccccgtacccctccgccccccggggccctgccctgcgggtctcacctgccgctcggcggggtcccggcgggggccggacagcgccacctggcggcaggtggacgcccgcgcagcgcatgctaatgagcccgcgtcgtcgctcgcggattggctggcgcggattccagctgctttccaagttggaggcgcctagtgagggtcagggaggcccggcccgcgccctccccgcccagccgcctccccgtcgaccacccagggctggggcgagccaggctgcctttcgaacttgggggcttctcctcttgtctcccactggtgctctggccgtgaatccatccaggcgccaggagatgacaatccggtaccaaggccggcagtacaggctgaggatggcatttctccaaaaggtaaccctggccccttacctgggccctggagtgccggggaccacatctgggaagcgtccgaggacacgtggggcaggagtggagggcacccctttgggtcgatttgtgcagctcgatttcattaagtgactggtgtgagttgtgataaagacaattccgtttaggtttccaagctgcgtcctgggcctggagactgagacagagatccacggactgcagtgcaggcagcccaccccagatccgagtcatataaggtaacccagacaaccacctacgaatttaaagctcctataagttgccctttctgcatccgaagtgtgatatttgaaagttaaaaacgttatcttacatacatagatcttaaaacgtatcttacaccacaacctactcacagatgcaaaggcagtggtcatggtcttccattgcttggggtcctggggccgggtttgaggctgaatgtcagggtttcctttgccataacctcattctgcaccacgtgctgtcagccaggcagccaatgtggacttggaggctggcatctgctgggcactgctcgaggtaccagggacacagtgatgagcaaaacgagcatggcccctgccctcaaagtcccttgaggctaaatggcccacccaagggcagcttaacagtgcccagccttgggggatgtgggctgatggaggactgggcccaccacaaggtaccttagggtgcccccagtcaaatatatctacttttttttttttttttttgagacagtctcactctcttgtccaggctggagtgcagtggtgcgatcttggctctctgcaacctccacctcccaggttcaagcgattctcctgtctcagcctcccgagtagctgggattacaggtgcgcaccatcacacctggctaatttttatatttttagtagaggcggggtttcactatgttggccaggctgatctcgaactcctgacctcaagtgatcagcccccttcggcctcccaaagtgctgggattacaggcatgagtcactgcgcccggccaaatacatctttctagaggagccaagctccctcagccagccaatggcagagctgcaggtgaatggcatcagatggtgttgacatcccacccaacatcagggacttctactgtaagtgcccgagcctctctgctcagggggttttctctggccataggaacatgactgccacacatgtggccagagtgccagggagtggatgccccctggatcagcctgcaactgatagtgaaagacagttgcttgatgaaaagtaccaagcttcctccccaccgggtatggctcttctgagggtgttctatgttgtttctcccagaggctcccagtaggacagaactcaggtggcccacgggggttgctgctcatgaatgagccctgtattgtccaccttacttaccctgtcccacctccccaggcaccagccgctttcaggaatcaatcttcccacccatgcgacaggctagttcaattattatctccgttttacaggtaaggaaactgaggctggtaagggctaacactagaagaattgttgacatgatacagaaaagctggtctcactacaattgtagaaacataattatttattttattattattattatttgagacaaagtctggctctgttggccaggctggagtgcagtggcgtgatttcggctcactgcagccttgacctcctgggctccagtgatcctcccttctcagcctcccaagtagctggaactacaggcaggcactaccatgcctggctaattttttttgtttttttttttatagagatttttttgtatttttaatagagatgggattttgccctgttgcccaggctggcctcaaactcctgaactcatgtgatctgcctgcctcggcctcccaaagtgctgcgattacaggcatgagtcactgtgcccagccaggagaaatataaaattaagactgtggtgagagggagcttccgattctacttgaagagtgggggtagtcatcactgaagagagagccttcaagcttggaggatcctgaggcttccgctgggcagaggaaggaagaccccacctgcagaagcagcccctgccgaagtacagggatgtatgagagtctggtgtgtctgagggcatgctgattgctgttcactgagcatatagtacaaggggagtgtgaggtgggacaggcaggcagggatggataggaaaggtctatgccttacagaggtggtgctatttttccccaaagagcaggtgagtgaagtggtcagatttaggttcaaatgagggctctaatgtaagccagaagaatggatgggatatatttccttccctgagccaagagaattcactcagggtctttctgtgctgtctgcaactccagttacctaggaaatgacagcttttcatggggtcagagggagtggtgctgatcagaagggcccttctcctgtgactgtggaggctttcacacctgtcatcactcctgtgatgtcccaggctcgatgcagccctgtgtaggtatgtctaccagccaagctgatgccaaccagccaagctgatgcccacctctgatgcctggacttgttgaaaatgtggtggaggctgggcatggtggctcatgcctataattccagcactttggaaggccgaggagggaggatggctggagcccaggagtttgaggacagcctgagcaacagagtgagacactgtctctccaaaaaaaaaagaaaaaaattagccaggtgtggtggtgcacacccgtagtcccaggtactcgagaagctaaggttggaggatcgcttgagtctagaaggtcctggctgcagtgagctgtgattgcaccattgcactccagtctgggcgacagaatgaaacagtgtctcaaaaatacataggtagattttttttttttttaatgtgtagaaggagatgaagaattcccctgtccagcggctctgcctggggggtgttagctggtgacacatagtgaactaaacagcagggctgggcaaactgctgtggcctccagcacacgcagggctcttgtttcagcctagcttctcatttcctgtgttccggcagccctgaccacctggggtgaggtggaaaaaatttccatctggacttctaaaatgctttcctatttgacttaaggaaaagttgaggatgtgagggtgttcttgcagcagatggggtgccaggaagagagttgagcttagacgagggctacaagaagaaaggatcttaatgaggcttgggcagaatttagaattgcttgtatcatttgttcactcctccatgtgacagacatttattgagcacctactatgtgtcaggtattgttagacactgtcataacacagacttcaggacacagtccctgttctcaagtgacttgtagtctagtggtaggagatggccacatgtatcaacacagtggcatggcacaggtgccatgcagacagctggagggtaaaggaggtgcttaagtgtgggcctttactttatcctgggtggaatgtcaagaaagcattctgaaagatatggtggtggtttctctaggtcttgaggatgtgaggctgttcttagggcagatggggtgccaggaggagagttgggacaaaggtggaagaggaacatgaacttggcttggatctattgtgtgtcagctgttggtcagagccagatggtgatgtccagtaggcaattctgtgtctggaggcagggcctgaaaaacctgggagacacattaaactggtcattgagaatgtaatagaaatgagggatgtttctgaggctgggtacagttaacaaggcatattagacttgggcatttggactgtggctggcagtgctatagttgggatgtgagttgccaactaaaaaaaagagcacagtggtttggggtcactatttacatctctgcacagcaaactcataattatgattgtcttccaggaagcttgctctggattataggaaaattccagtccctgaaatcttgtagagagtgacagccacttactatgagaagaaatcgtgaccatggggtggatggaatattgagactatcactttctgatactttcagtgactgtctgggtactttaaaatgttcaatgtcatacctcacttagctggaatctgagaggggcaacgctaggcctgtgatggggtcagagagagtccagtgatgatgcttttttttttttcccccgatggagtgaagtggtgcgatcttggctcactgcaacctccacccccgggttcaagcgattctcctgccttagcctctggagtagctggaattacaggtgcctgccaccatgcctggctaatttttatattattagtagagatggggttttgccatgttggccaggctgacctcgaacgcctgacctcaggtgatccacccgctttggcctcccaaagtgctacgattatagatgtgagccaccgtgcccagcccagtgatgacccttttatgtagcatttgtttgaggcctcaggaaatagttgtggagaagtcaggattctgggagaactgggcagctgtgctctggtaaacagtggtggggtggggtggggaggtgatggtatggggaaggaccgggggtcttcaatgtgtctcacgaaaggagatagctcagaagggatgcacgctggacagaagaaggggtagcctggagaaaggccacagctgcacccttcctggggagcttgaaaatcaaggtgggttttctcccgtcgtgagtggagtacaggcacctgtcacctgccaccttgcccaccaagaccacctctccaagaccattccggacccaaggagtcagtcatatttttcgtaattgagatttattacaatttaaaaaggaatcccttaagtgagtttacaggggaaaaggttggaggaaaattattctgtcccctaatgggaagacccctaaaaatgttcaagacacagactcccctcttcccagaaaatccctcctttgtgcagagacgtcatcgctggaaagcccctcttgattgtgcttttagaaataactcctgttaatctcctttgaggggtagttgcaaattcctcagagattgatttttttttttaaacacaaagggaaagaaatggagtgactgtcatttttatcagagaagtttaaatgtctaactggcaaagtaggtacaactccgccatccaccgttagctccctctgcctcactactaaggagatggttattttacccgatgaagtaccgtatttataatctgaaaagttatgactgaaaggacgaggatgctttaagccctgtcatcagaaactgcataacagtgtgtgtgtgtgtgtgtgtgtgtgtgtgtgtgtgtgtgtgtgtgtgctggggaggacggggctgttggctgctgctgaaaagaatcactccagtagccatggctcctcagtcccctggccatcccaggaagagcaggaccacctctcagcatcccccagtacagtgtggggttgtgtctttgctcccctctctgctgttggcctcatggctgacccagtggccagaaacactgccaagtcctgacactgcagaaagccaaggattgtggctccaaatcaagctgaaatgaatagcttttgttccaaaacaattctgtgagccaagaaagtgtccatgcagataaagcttgcagtcagtcttgcacaaggagccccagccgtgttttgcacgctgtctgagtgactggcgctgtgcccggaatgctgagtggtgaggctatcctcagagccttccctgtgcacctgatcttggcccatttcttgagattgtggttcagctgcaaatgcttgtttagcaacagagattgaaataggaaatccctttccttagtgttggcataagacattgttccatactctttccctccttgggaagattggagcctcctagcttcaggagcaggctgcctgagagggagggggcaattaggatttttctgattcagctctcttctgatatatccaggttagtctacacctccttcctgtctacctagccatatcatgggttccttcccaagttcacttcctctaggaagcattcattgaccatctgtcttagtccattttctgttgctataacagaatgcttgacatgggctaatttataaagaaaagaagcttatttggctcacggttatggaagctgggaagaccaagggcatggtgacagcttctggtaagggatttttttttttttttttttgagacagagtctcgctctgtcacccaggctggagtgcagtggcctgatttcagctcactgcaagctccgcctcctgggttcacgccattctcctgcctcagcctccctagtagctgggactacaggcacctgccaccatgcctggctaattttttgtatttttagtagagacggggattcactgtgttagccaggatggtctcaatctcctgacctcgtgatctgcccgcctcagccttccaaagtgctgggattacaggcgtgaaccaccatgcctggcccctggtaagggatttcatactgcattataacacagcagaaatggggaagggcaagtgagtgcacgcaaaagacacctcagggcactaactcagtcccttggaaatgatctcactcacaaacagcattaatccacttatggggctctacccttattacctaattcccttttaaaaggccccacctctcaatactgttacattagcaactaagtttccaacacatggacttctgagggacacactcaaacctatagaagcatcctgtgatcacagtcccttttcagctcctgtgcaattaggatctgtatgcttcacatgagacacatttttattctgtgctgtgtattggtcatctctctctatatactttaccacctcagctcccagaggacaaagattatgttgtttatttgtagcagtcatgccactggattcataaaaagtattcaattaaatctcactctttgcattaggttgtctaactgagtttttcttatgtgtctttactgtctggtccctagaaggcatattgtgacaatgataacatctatcactaccactcccaccctattgtcactgttcctatattgccttagggattatataactgtttcatattcattattttcatttgatcacaagcacccttttaaatagatagggcagatattagatgtttttttccttagtggatgaaaatactaaggttcagagaggtcagttaactggtccagtgtcacacagctgacatcatctatttttcagcttcactgaggctagaaaaaccagtggtctcattctgaggacggctacgtgcatatatgttaaaaggactttgtgaactgagggctcatacaatggtgcatagaattatgattaatggcagccagacacggtggctcacgcctgtaatcccagcacgttgggaggccgaggcaggcagatcacgaggtcaggagatcgagaccatcctggctgacatggtgaaaccctgtctctactgaaaatacaatacaaaaaaattagccgggcgtgttggtgggtgcctgtagtcccagctacttgggaggctgaggcaggagaatggcgtgaacctgggaagcggagcttgcaatgagcaagatcgcgccactgaactccagcctgggcgacggagcaagactccgtctcaaaaaaaaaaaaaattatgattaatggcagaaaaatagatactgcaagattgaaacagttcaatgaagacagagcagtatggatggatggctctggatttggttgataggagccaaagagttgattgcgtttgaggggccctccaggtgcagatgtgtagcaggcagcgggaaataactctgaggagggcggcaagggcagagtaaatgggtgaggaatgaccttcattcttactgtaggtctcctgtataccctgatatttcctgtctccattcctttgcttctgttgtaccttcatcctgggatgcctctcctcaccccagagcttgaggctgttatttccagttggctgctacacatttctgtgtatatgttccagagcacggcacaaacaagtttttctctttcaaaacaggctgctttcttttgtgtttcctgttttaaatactgactaccaccattggcttggcagagaggtaggaaatcttggaatcatattctcttgccttcaccaaattgtatacattatcaactaagtttcaaacacacaaacttttgggagtcaccttcaaaccacaggaccatcctatgattgctgtcccttttgagctcctgtgcaattaggattgcagtgtctaagtacaagagactcatctatagtgcttctagtgaccatattctcttacttttcctcattgcctctgcctgaactgtgctctctcctgcatgattatttcctctgatacagaaaggtttactcctcctttttctctacttggccgtaccatgggttcccttccaagttcacttcctctaggaagtatttcttgattatttgtcttagtccattttctgttgctctaacagaatacccgagactgggcaatttacaaagaaaagaagcttatttggctcacgattatggaggctgcgaagtccaagggcatggctacaactgcataccctcctttttgcatctataattttgcacatctaaaaccatctataattttgcaaaacaaggcaaactctgctgcttctccatgagagcttccatttgtctatgaatgacatcgaagacctattgtgtcctggatttatttgctctcccttggcatgccatgcagttttacccattcatgcctttgcacgtgcttgttcctcagcctggaatgctccttttctctggggcagaagcaacaacttcttgccaaatagcccatgttctctgagttagaattactgggccatgagcagaagtgttgtgtgggttttcaggctgaagtcttgaagggtgagtaccaattctccatgtttttctctcttcccctgcacagtgatggagcacatgtaatggaatgagaaaccataaatggtagcagcctagagagttgagtcaagacatcaagggagggccctggacactgcccaacttgacttagcattttcttaagagagataaacccttgttgggttaaatctgtgttaccacagcataatctaaattatcctgagtaatacattctcattttctgccagttacaaatctttaagtatcagcttaaatcctctttctttaaaagccttccagaaccaacccacccctagccagaattgatgtcttttctttgtgctttcacagcctgtgtaacttatgtctatttgacacttaatgcctagtattatggttggtcatgtagagttagtgacagaatgagtaagagtatgaattccaaagccagactgactggttcacatatcagctctgtcatttaccagcagtgggaatttcgatgagttacttagacttccagaacttgggttcatatttgtccctccagaacctaccagagtgtccgacatagtaattatattacatatgtcaataattatgttaaataatacctgtttaccggcctccttcttttttgtcttgcaggttgaaatatcagtaaaaaacatgcagacccaaagatggggaccaaaatccaaagccagagggtcctggaaatcagagggtcttacaacataacaggcagtacaggccatggctcaggctaggcgtggaacagactgcagttctcttctacaaatcaatctagactggacagacagaactccaagggaggaaagaaaaatgaatctgatgttacttcttgaaaccacattttctgaagtcaccatttttatgtatctatcaactcatcatttttatgtatatatcaatatgattttatgatcttattttttcctactaatgtgatgaattaccttgattgattttagaatattaaatcacttttgtattcctggaataaaccctagatggatgcttgattttttctaattccttagcaaaaatgctaatattttatttaggattttgcatctatattcacaagtgaggatttttttcctctcctgacaccaaccaattctccaacacaaactgagtgtcctacaattcaatttaattctgacactacccagagttagcattagcctccacagatttaaggcctcagccctacaagactgtcccaatcagactccagttgcaagtcctgggccacccatacttctgggcaactggttacaaattgggggttcttatgaccacctcccacaggcttgacaatttgctagaatgattagtggaaagcaagaaagtgcttaacttaatattactggtttattacaaaggatacaattcaggaaaagccaaatggaagtgatgcatggagcaaggcaagggagaatgagcacagagctttcctaccctctccaggcacaccactctcccagcaccttgatgtgttcaccaacctggaagctctctgaaccccatcatttagaggttttaatggaagtttcattacataggcatgacttttttttttttttttttttttttttttttgagacggagtctcgctctgtcgcccaggctggagtgcagtggcaccatctcggctcactgcaacctccaccccccaggttcaagcaattctcctgcctcagcctcccaagtagttgggactacaggtggacaccaccatgcccagctaatttttgtatctttagtagagacggggtttcaccatgttggccaggctggtcttgaactcctgacctcaggtgatccgcctgccttggcttcccaaagtgctgggattataggcatgagccctacatagcaatgactgattgaatctttgaacactggtgattacttcaatctccagccccttgtccctctcccctccccagaagtcagtgggtggggctaaaagttccaaccctctaatcatgcctagttctcctttttttttttttagttgtttatttttcttggcatgcagaataagagctattgtctaggtctttctggtgacctcttcatcctgaactacctagaagcctccagccactagtcatttcattagtatacaaaagacactcttgccattgtggagatttcaggagtttcgggagccatgtgccaggaaccagggacaaaacccaaatatttattttttctcataccacaatgattgacattggtctgtaattttttctgcttataatatcctagtccagtttttctattaaggttatggccacataaaaagagttgggaactatactctgttttgctattctttggtagagtttgtccaagtttatgcaagattggtattattcttttttttttagagacaggttctcactctgtcacccagactggagtagcagtgatgccatcacagctcattcactataaccttgaactcctgggctcaagcaatcctcccacctaagcctcctaagtacctgggactacaggtgcacgctgccatgccctgctaatttttaaatttttggtagaggcggtgccttactgtattgtccaggctggtcttgaactcctagactcaagtgattctcctacctcagcctcccaaagtgctgggtgtataggtgtgagccaccacacacagcccatggtattattctttaaatatttggaagaattaactgatgaagcaagccatctggggcttggaattctttgtgagaagttcttgaatagattccatttatttatgagatattggctattcagattttacttttttatgtgggctttggaaagttgtatttttcagggggtttgtctattttatccaagttgtcaatattttggtgtaaagacaataatattctcttatctttgttatatttgtgggatctgtattgatattcctttctaatattgaaaatttgtcttttttgtttctgttgatcagtattgtttggagtctatcaatataaataatattttcaaataaccaaattttgatttcgttgatttttctccattgtatatgtgttttctatttcttttctttctttctttttttttttttttgagacggagcctcgctctgccgcccaggctggagtgcagtgacacgaccttggcttaccgcaagctccacctctcgggttcacgccattctccagcctcagcctcctgagtagctgggactataggcgctcgccactacgcccggctaatttttttgtatttttagtagagacggggtttcaccacattagccaggatggtctcgatctcctgacctcgtgatctgcccgcctcggcgtcccaaagtgctgggattataggcgtgagccaccgcgccaggcagatttgttttctatttcactgatttataatctttattatttacttctattttccttagatataacttactgttctttttgttcttaaactaaaaaaataaatcattgactttcaccctgtccatttttcgaatatacacatttttaaggttataaataactctctagtccctacattagctgcatcctatgagtttttagaagttacgtcttttatggggtcacattcagttcaaaatatttgctaatatctgtctagatttcttctttaatctatgagttatttagaaatatattttttatttccaggccgtggagattatctttttattattgagttctgacttaattttattctggtcaaacaacattctctgaatgatttcaatgttttgaaatttgttgaggctttctttattgcccatcatatgatcaattttgatacgtttcatgtacacttaaaaagtaaattcatgcatgcctgtaatcccagctacttgggaggctgaggcaggagaattgcttgaacctgggaggcggaggttgcagtgagccgagattgcaccattgcactccagcctgggcaacaacagcaaaactccatcttaaaaaataaataaataaataaaataaattctatcattatgggtacagaatttgatacatatacaacaactaagtcaagtctgttagttgcgttatttaaatcttctagatccttactatattttcttgctctataagttaccgagaaatgtatcttacagtcttccataatgattgtggatttgtcactttcttctttgagttgcttaatttttgctttctgtattctgaagttataagtatgtatagatttgtgatttgatatctacttgttggattgacccattataatatgtaccttttaatatctagtaatgctttttgcttcaaaatcttacttcatactgctatagaatgcctggtttcttttgttagacttttacagtctatctttcctcatcctttttctttaatcatcgatctccatgtatttaaagtgtctcttttagaagtcacatagagttaggttttgtatttttcatccagtatgataatcttagtctttttcttttttttttttttttgacggagtctcgctctgtcaccccaggctggagtgcagtggcgcgatcttggctcactgcaacatctgactccctggttcaagtgattctcttgcctcagcctccagagtagctgggattacaggcacatgccaccacgcccagctaatttttgtatttttagtagagatgaggtttcaccatgttggccaggatggtcttgatgtcctgactttgtgatctgcccaccttggcttcccaaagtgctgggattgtaggcatgaaccactgcacctggccaatcttagttttttatttggattatttagtctatttaaataatagtaaagtaattattgatataaagttgggtttattctatttgttttctgcttgacccatctgttttctgttgtttttcttctttcttgcattcttttggattaagaaaatattttctatcattctattctttacctcaagcttgttagttatacattgttttgttacatattctttttctttagctgttatcctagagattaaacaacatgcaatcttgacttatttctgtgtaatacaaattattacttttaccagttcccaaaacatttaaaactttaggaaactttagttttatttatctccttcctcattttgtgttgttgttatacatgtttagttctacacatatatttaaattccataagacattatacctattgggttggcaataaatattcattaataattacctatatattcatccattctggtatttttcttcttttttgagagacagggtcttgctctgtcaccaaggctggactggtgtgctagcacaatcatggctcattgcagcctcagcctcctgggctcaagcagtcttcccgcctcagccacctgagtagctagaactacaggcatgcgccattatgcctggctaatttttaaatttttgtagaggtgagatctcactatgttgcccaggctggtctcaaactcctgggtgcaagcaatcctcccactttggcatcccaaaatgctgggattataggcactcctggcatatatatatattaaaatatatataccaaaatatatatatatatacattttaattgaaatatggtattcactcagaaaacatgtacagatcaatacattttcacaagcagaatgtggtacatatattttaaaacattaaattctgtttaaagaagcaaaattttgtattttaggaacacattacttactgttcaaacagatggtttcctgaggaaatgtgtgtgacttcacactatggggctgtctttgtcagccctcccagactgccccatctgtgacttgatttttttttctccttgtcaaggtgtcctcctcaattcaattcacctctgcttcaggccaaccgagacagggtccttttgtcaaccttctggcttcctttgccctgagggacggaagcctttccccacaacccccatcagcttctctttctgcatgttgctgatctggagacctgctgtcatttgtggctgctctgagacatggcctggtcatgggggcagagcctccctttgactgcaccatttgttagctgtgctttagccttctgtggagattacgactggaaaggcttgagacattgatgactggttcaacaacaagagcttgaactgtatgggaggaaagactgaatactacaattttagcagtcattactggggaagctggcaggaggatcatttgagcccaggagttcgtgacagcctgggtaacagcaagaccctgtcttattaaattataataataataaactgaattatggacaaaacgaagttaacaaatttttttagcagtcaccattccttaagcacctactgtcaggtgctctgccagaaacttctatagagcatctcatgaatcctcaaaataattctgtgaagaaaatatcattactatctgatatggtttggctgtgtccccagccaaatctcatcttgaattgtagttcccataatccccatgtgtcatgggagggagccagtatgaggtaatttagtcatgggggtggttaccctcatgctgttctcatgataatgggtgagttctcacgagatctgatggttttataagggactttactccttttgctcgacacttctccttcctgctgccacgtgaagaaggacgtgtttgcttcaatttctaccatgattataagtttcctgagacctcacgagccatgttgaactgtgagacaattaaacctctttcctttataaattacccagtcttaggtatgtctttattcgcagtgtgagaatggattaatacactatacaacttcaaataaggaagaggaagctcagggaagcaatttgcctaaggtcacacatctagtaagtgcagagagtgtttggatcagatttaattcatgttctttgctctaggtccagtcacatcttctatgcctatctcagctgctgacacgtgactcagctgctcccattttccttggaaaagtaggagctggaaaggacctcagtcagaggtcatccacatcaaccatctcatttcactgatgaggaaactgagacttggaccaggtcagtggttgtcattcacacccacgtgccatccatacccacgtgccagtcactccaaactacacacatttctccaaaggcatctgggtgttcccacctctctgcttttgctaacaagtttccctctgctggaagtcccctttctcctcatttcacactgttaatgatcttttcagctttcaagattcactccaagcatcatttctctcatcatctcctgagtatctgcaggctacacttagcaatttctactgtgcaggggagttaccacagcacgcctgagactgctaaccttagaaagccctgctttcaaggttggcctttccaaggctggcatgtaggagcttgggtttcaggagagttcccatgattccctgataagagtggctcattgtgcctggactgtttgtgcaaacagtatggcttatgtgaaacacctgctttccttctgggagtctggaatcttggtgcatgctaggcagaggttggctacatgaccagccctcagtaaaaactttgggtactgagtctctaatgagcttccctgataatggacaacatttcacacttgtcacagcgcattgctagaggaattaaacgtgtcctgtgtgattccactgagagaggctcttggaagcttgcccctggtggcttccagactttgccccatgtgccttttccctttgctaattttgctttatatcctttcatggtaataaattacagccatgctgatggctatactttgagttctgtgagtcctccaagcaaatcactggacctgggagtcttgagtggtctttgggatccccagcgcacctgctgtatgttctgccatatgcttgaatatagatttcctgcattaacactcaaatgctgcaatgttttggtttatgaatctctcactcacactgtcaaaaagcaagtttgtgttattcttcttttcatttcaataggttttgggggaacaggtggtgtttggttacatggataaggtctttagtggtgatttctgaattttggtgcacccatcacccaaaccgtgtacactgtaccccatgtggggtcttttatccctcacccccctcccacccttcccccagagtccccagagtccattgcatcaattttatgcctttgcatcctcatagcttagccacttatttttgtttatttatttattatttattttttgagacagagtctcactctgtcacccaggctggagtgtagtggcaccatctcagctcactgcaatctctgctgcctgagttcaagcgattctcctgcctcagcctcccaagtagctgggattacaggcgtgtgccactaccccaggctaatttttgtatttttagtagagacggggtttcaccatcttggccaggctggtcttgaactccagacctcgtgatccacctgcctcggcctcccaaagtgctgggattacaggtgtgagccaaaatgcccgccctgcttagccacttataagtgagaacatatgatgtttggttttccattcctgagttacttcacttagaataatggtctccaattccatccaggttgctgtgaatgccatgatttcgttcctttttgtggttcagtagtattccatggtatatatatatataccacattttctttatccactcgatgattgatgggcatttgggctggttgcatgtttttgcaattgcgaattgtgctgctataaacatgtgtgtgtttatagcaagggaacagcaagagagttttggtagccagcttccaagatggctcccaatcatccctgcacctgttttcatgccttctcccattgagtagggtcaacttatgtaatcgctaggttattggggaaataatggtgtgtgacttctgaggttaggccataaaagatattatggtttctgtcttactcttttgagtcacttattccaggggaagtcagctgccatgttgtgaggacactcaagcaatcctatggagaggcccatgtgatgaggaactgaagcctcctgccaacagccatgtgagggcaccatcttggaagcagatccgccaacttcacccaagccttcagatgaatatagccctgaccgacatcttcactacaatctcatgagagaacctgcgccagcactacctagctatgatgctgcaaaattcctgacccatagaaactgtgagataataaatgcctgttgtgttaagccacaagttttgtggaaatttgttactcagcaataactaacatgagagttagctgaaggtcacattcttgttgagtagtggaaagggttttgttaacccttcacccactgtggttcacttgataaatgatagatgaataaagagtgaaaatgagcacaaaagtgcctaagaaaattttcttctttattggatgaggaaagggtctggaacaaactaatgtaaaattgagaaaggatgaggggtataatcagaatgacatacaagcaatgaaaatgaatgagctagagctaaacactactacatatattaatattagctgcatagtgttgagtaaaaaaagctagtccagaagacaaaatagtgtaagacatccttttgataaagttttaaaaaagtgaaaccaatgtattgtttagatataaatggctgtgataaaacaaaaaactccaaaggcaagagcataaactttacaaagtttatcatagtggtcactcctatagacagggaagcaggaggattggtcagagaggagcatgttgtaactctaagttattggtcatgttggttcatgaaatattcctaatactattaaataaatctaaatagaataaaataaatagaaagggccacgcatagaacaaagatgtttttgtaccagggactgagaattatgactaacccaatccaataagcctgaggtccaataaaaagggtggtggtgatgggggttagtctaaggcctgaagaaagggagggatgttaacactttaaacactgatagtcgaatgtgaagcggaggcagggtggtcagtgggatggaggccactctaaacaaaatgtatggtttttgctatttgggagtaaaaggcagcacaatttcaggacactttattttttgtttgtttgttttgagacagagtctcgctctgtcgcccaggctggagtacagtggtgtgatctcggctcactgcaacctctgcctccaagattcaaacaattctcttgcctcagcctcctgagtagctggaattacaggtacgtgccaccatgcccggctaatttttgtatttttagtagaaacagggtttcaccatgttggccaggctagtcttgaactcctgaccatctccttgttctgattgcaagctcactatatgtctcagtacaatataagaatctagtctcccatgtagatcttcctacaggaaagaaacacactgttggcaaatacaatgatccagtctgactgataattatgtttttcactagaaaggaattaactcacactccaggtttatacatcaacttcttttagtttggttagcatgtgacctctggatcctgcttacctctgtgtgaactaatggaaccagcgttttggccctacagagtgaaggacaggatactggaagaagacagtccaaggcattgttacccagtcatccccagtcaggtcttgtttgaaactccaacagtttagtaatatactagtaagtcaatttgtagctctacttgaagaaggtttgtgccaaacaagatagtttcagtaactaagctatgttgagtgatgttcaaaacaattgttctaaattttattctatgtcagagcaaggttccaatgaatatcaatgcaaatatacaacacatttaaatggtttttaattacattctatttatacagttagcaaatgttgatcacatcttattaaaataggtccatctaggagactgtgaacaaatttctaggtttgtcattaagaatccctgaatctactgaattttagaatttcgacacaattcacattttttccaaataattatttctactgttttataaataactgtatattgataatgtttgctcaataatattgagatgttatttactgttcatgatgtgtgcaggaggaagtccaaggccaggttttgttcatttccttttccaggtgttatatggcttgtggcacttcactaactaggaatcattttcttgaacgttcacaaaacagaaactatcctaaccgaaatccagtcagatgatttcaaaaaagtagatctgaaatgccttttgagagctgcgagtgccttctgagcagtcctgtgcccaggtgaatgctttatgtcagcattttgcaaaatgtgttctgggaaaaaccacatgggagggatattaatagagtgttactttaaagtttctgtggttaaaatgctagagaaacaccagactaaacaaagttaagcaagttcatcacggcaggccttctctgaacgatctaatattctattaactgtgttaagagactggcagattcctccctccctccctccccccgctctttctctctttcttttttctttctttccttctttttctcttttcttttcttttccctccctccctccctctctttccttttcttttctttctgtctctctctctctctctttttcttattttcgcctcaggaacacataatggcaaatgcttctttatagggaatatttcccaacacaatctcatagaagtgtcagagaaggtatatcagtttcacacatgaatagtttccgttttatggatagtttccgttttataaatgttcaagaaaatgattcataatcactgaactgccacaagccatataacacctggaaatggaaatgaacaaaacccggccttggccttcctccagcatacatcatgaacagtaaaataacatctcaaaattattgaggaactaacacctgtggtaagtggctgccctggtagagaatccaggccagtattctcaaactagtagtctacaatcatgagtctcatttctccttggtaagatttttttttttctgagacagggcctcattctgtcacccaggctgcagtgcagtggcacgatctcagctcactgcaacctccgcctcccaggctcaagccatcctcctacctcagcctcccgagtagttgggactacaggcgtgcaccatgatgcacagcctttggttaagagatcttgattttgtcttcaccctcctctcccatagggaggacgttaggaccctttctacccctgtacctccaatcctccttccaagtggcactgtctgcatagttcttgtactctactcttccaggctcatagttcctcatcttctgaactaatcttcttccccattatgtggtcacaatactaaagtgcattttttgtttgtttgttttggttacttgacttgttaaaattgacaagtcagtcgttctcctacatacgggaaaaatgggccctgaagtatatatatttacaggtcttgttctgtcgcccaggctggagtgcaggggtgccaccaaggctcactgcagcctcgacctcccaggctcaagcaatcctcccacctcagcctccagagcagctgggaccacaggcgcacaccaccacgcccggctaatttttgtattttttttttttttttttttttagtagagactgggtctcgctatgttgcccaggccggtttctaactcctgagctccagcgatcctcccaacttggcttcccagagtgctgggattacaggcgtgagccagtgcgcccggcctaaattaaatacttttaagttgcagtgtcaccattatttttttcgagcctgtaggggttataaaaaggaaagtccagagcttaggtattggaggggccgatctcgaggtagcacttaggcgaaagggatcccggcgctatgggcttcaagggggcccctccgaaaagccttccaccccggcccccaatcccgcggcgcgcgagttccgtggaggaggccgcccgcggccccagagtcggcattaggggttcgcgtccacccggcaaggcctcccgtgagcccagagcagggacctaagaggatgcgagaaaccctccagcagaaaaaaccccgcaaactcagtgcactcaggacgctgtctgaaagaagccgaaagtgggcaaccgccggaagccgacaccctgagcccgcatttcctctctaggaatccggaggtttccgcatctctatggtctgggcgtcgagcggcggagcctgtggtctctggcgcaaaggaaagtgaactcccagcgaggaggggaaggagcatcggcttgtctcttcgcgatccctttcctaccccttctcactcgtgcgcacctggcagtaccaccagcagagcctcggaaattgctttcatcacgatttaacaaaatgaagacacaggaacacaataggacacccccaaactcaacaagtttctctagctttttgccagtagtgtagcgcacatgcatttttaaaatttagatgaagtctaacattcatgcaataacacagctgaaatgacgagtaataacaataataataacccagaaatgtttgacatttgaagttccttttgagtttgaaccccaggctggaactggatgagctggcgtcgtctctcagcacagaccctgtcctctggtccctaaggccgcgagcaggagagacacacctgttcttccacttgctcccagggctccagctggcccatctgttgattcgaaggttcatgctaaccaacttacatatactttcttatttgtattttccactctaaaaagggatagggaaaacaatgcaaatataaataactgcagaatctactaaaattagaattgtctaggtttacaaaacatatggcatccaacacaaataagggtgtggtgaaatttgttcattctgagcagacagaatgtaaatatatgcatcctgttgaaaaactacttggcattttatatcaaaagccaccgtgactcatgggatcccatctgtgaaaatttatctcaagcaaataatgcaagagaaaggaaaagctgtatttttgaagtgattctgcaatggacaactactgttattgttcgcccaacattcagtttttcttttaatgattttaacagtaggatttttctgtgggaaacctactagccctcaatccacttctggggtgggcccatgacccaggcctggccaatgagaatatcccagcatggcaaggcagtaagacatgaagtcatgagccaggctgaaggccccgagtcctggctctgctgcttaacagatgcatgaatgtcagcttgttattcagcttctctgactctcagtatactcatttgttgaatgggcacattaatagtcccctgcctcacaggggtaaagattaaatgaatgaagcaggtgtaacagggcttgttatgtcctaccatgatcagttcctacctctgtgactctgatcaatatttcctatgtctagcatgctttattaccacctttcctttctttccttttctttttactttccacatgttgcaatatcatctactgcattatcctagacatttattttatatttttctttcctccggggaataccctgaaggtgggactgtgtcttattcatctttgtactctggttgcttaacacagttcccaccccagaaatggtgctcaataaaggcttcttgaagaaacggaatagccttgagcccagagatgagaaagaagttggaacaactagtgaaaaggtgataaatcctagatgataaacaaaaggggaatagagagaaccacatgaatatgaacaattttctttaaaaaacaaaaaaaaacttgatccctggggattgcagactccctatctccctagccctggactggctcccatgtggtggacagatgagttctaaggacagacttgtgcctaagattcactttctgaattactgcttcctttttctgccttaggaatcatctcttcccttggagactaacaggagaaattagcattcttttcagatagatccaatctgccttcaggaaagaccaccccgcatggccaatattcatgtgcaaaaattcagacataaaatgcaaagtgtagaggaggctttaagatacagtaaacaaggccaggcatggtggctcataactgtaatcccagcactttgggaggccaaggcaggaggatcctttgagtccaggagttcgacaccagcctgtgcaacctagcgagacccccatctcaacaaagatatagtaagacactagggaaaggacaggcttcattaggtgcctggaggagatgggtcaggccagcctggaaaccctcgaaaaccctttctaatgagtgattgctcatcttttgatggtgatactgaacgagtgataccagcatcaatttctctgctgtacaagaccctcctggaatccatctgagactcagaaattctcaggtttgaaagagatggacagcagcacagtttgccattgagtatagagtagatctcatctacaactttggactgtggccactgaagctgggaacactccaaagacacccagttccctggtctgtgagatcatctgcttaaagtacaaaattagttgttagaaagtttttccatgaagtcctaattagtattaatgtaatagtgtcttaattcaggtattggtaacccttagcaatcttcggtgaagcatccagaacctaacagatagaggacttcctgacttaaccgacttctcctaccaccagattctgcaatttagcaaacattttcacttttttttttttttgagacggagtctcactctgttgttgcccaggctggagtgcattgtcatgatctcggctcatgcaacctctaactcccgggttcaagtgattctcctgcctcagcctcccaagtagctgggattacaggtgtgcgccaccacacccagctaatttttgtatttttagtatggatggggtttcatcatgttggccaggctgttctcgaactcctggcctcaggtgatccgcctgccttggcctcccaaagtgctgggattacaggcgtgagccaccatgcctggcctaaacattttcacttacaatattaattataattttttaagaataatttgattttctcatagcaagcaaatgaattattagaaagtggaggctttgcccaggggtacgcatgttagtaagcagccaaaccaagactcagccatggtttattttgttctgaatcctgtgctgtttccatgactgcagtgctcggcctccctgaactgctagataacagtgacataaattcagtgaaataaattctggctgtgttggccaggcacggtggctcatgcctgtaatcccagcactttgggaggccaaggcgggcagatcacttggggtcaggagtttgaggtcagcctggccaacatggtgaaagcccaactctactaaacaaacaaatgaacagaaaaacaaagcaaaacaaaaaaacaaaaatcagccaggcatggtggcatgagcctgtagtcccagctactcaggcggctgaggcaggagaattgcttgaacctgggaggtggaggctgcagtgagccaagattgcaccactgcactacagcctgggcaacagagcgagactccatctcaaaataaataaatacataaacaaataaataaataaataaataaattctggctgtgtctacctgggtatgggattgattgatccatgactgggaaattttggacaagtctgttagaaagaaggtgaggggctcttcttgaaaggctcttaagaaggtagtaggccaggtgcagtggctcgcgcctgtaatctcggcactttgggaagccgaggtgagtggatcgcttgagctcaggagttcaaacctgggtaacatggcaaaactccgtcttcaccaaaactacaccaaaaaatttagccgggcatggtggcacgtgcctgtagtcccagctactcaggaggctgaggtcagaggatcactggagcccgggaggttgaggctgcgtgagccgagatcacgccattgcactccagactgggtggcagtgagacccctgggcccagagaaaaataaaaagaaatgaaagtagcaaatgtggcagacttaaagctgagaggagggaagacctaactcatgagggatgggacacttggagcaaacagagggtcctgggatctagaggtttcacaaggatgaacaacaggtaagtgaaccctgagcagaactgaatgctggacttagagggcaaatatacaagttcagactttccaagacgactcagctcaaagttaagatcgggatatggccatggaagtggatagctgaagtgaagcagaagcaaagatcgctggaagggaggaggttaaggtcagaaggttggggaattcatccactgggaccctgaaatcacccaggatggacaagaggaggatgtgggtaaggtgctcaagttctgtgggggaaaatctggaggaagacaagagtgcaaggaggaggagaggggtggagaggggtgtgtacgtctcagaggaggaaaggtttagcaccaaagtagaagagcgatgcctcagaagtggcaatgggaagcttggggaactcctaataccagcctggaaatagggtgatgacaggggagtaaagcaacctcccctgtaatggatgtgacaccccggaggacaagcccagttgcccttaggaggaagatctagtagaatattccaggaggacagaatgctcattctattatcattatttttttagagacaaggtcttgctctgtcacccaggctggggtgcagtggtgcaatcatagcttactgcagcctcacactcctgggctcaagtgatcctcctcccttagcctcccaagtagctgtgattacaggtacatgccactacctgactcatgtgttttaaaaaattgagatataattcacataccataaaatttaccctgtaaagtatacaactcagtagttttggtatattcacaggctgaatctctactacaaattccagaacattttcaagaagaaacactatactcattagcagtcacttctcattccttccacccctaaggatttgttttttgtttttgttgtttttttttaaatgaagtcttactctgttgcccaagctggggtacagtggcacaatcttggctcactgcaatctctgcatcctggatccaagtgattctcctacctcagcctcccaagtagctgggattaataggcgtgtgccaccatgcccggctaatatttgtattttttagtggagatggggtttcaccgtgttggccaggctggtcacgaactcctgacctcaagtgatccgcccaccttggcctcccaaagtgctgagattacaggcgtgaaccactgcacctggccgggatttgtactttttaataaaacaccacatttgctgtcagtagggtggcttcaattttgaactcagaaggaatctctactaaagataaagaaagatgagaaaaaaaggacaattagcttttccaaggttcaggtgatgtaataagacataaagataaagatggatggacggatggatggatggatggataaatggttagatagacagatagattgattgattcgcagatagagaaagcgattattaggttcatacatcaaaacaaagataaatgaacctagggaaagtggatctttagaagcaacacctgaactggattaaaaatgcattcttgcagcatttaatgtttctttgtgtctcctgtatcaatcatctccctgtgcccttccagacatttccatttctgggaaaaccaagggtaaaatgggcaggagttttggaaaatcccttgctttggaaaaccataagacagacacttgttccctatcaccctctcagctccttacaaagagcggtggtggctgctggaagctgaaggaggaggtgggaccccccaacctccaacacacagctgtggtgcctgagccatcccgtcacagtcaggcaaggggagaatctgggcagttggcagaaacaccgagggagccacaagcctccaggtggatcttgggggcctgtgtcagtagaggaccctcagttggcgtgcattctgtttaagcatcctttgcagggtgggagtgtttagccaaagaaaggggcttcagtaagattaatacaaatggagtgcagcaattagtacattttcctgaggtctttttttctaaagtaggtccctcttgctccaaccccgatctctgtctgataacttgtggggaatgttgatggtagcactcagctcttttgaatgtctgccacatggaatcccattttggggcggctggtctaagttcagaggggccttgacttagggggagcactgttcccactctgctacacctcagggctgattgaactttttactctactcagaatactgacctcataggatttcaaaatttgaggggacttttgaattcatcacgtctgattctttctgaaattacatattactagtgagaaactagagaatcagagaggttaggtaacttgatcaaagtcacccatcctcagtgggtgtggtggcacacatctgtaatcccagttacttgggaggctgaggctggagaatcgtttaagcccaggagttggagtccagcatgtgtaacacagcgagaccttgtctctacaaaacataaaagaattagcctggcgtggtggtgcatgcctgtagtctcagctactcgggaggctgaggcaggaagatttcctgagcccgggagttggaggttgcagcgagctatgatcgtgccactgcactccagcctgtgcaacagagctaaaaaaaataaaaataaaaataaataaataaatacaacaaagtcacccatccaactaatccatagtgacagaaagcaggtcagttgttgtgtgggtacagtgtagggggaggaggtgaaggtcagaaggtggtgcaaagaagttctggaagatgatggataggttccctatcttgattgtgtgtatagtttcatgggtgtatatatatgccaaaacgtatcaaattatacactttaaatatgtgcagtttattgtataccaattatactcgatgaagctgtgaacaaaaggcccctatctggtcagaagcagaggagggataagaacacacatcttgtgcttcgtggtcttcacaccgccctaaccccagcactgtcttaaaaccaaagcttattctaagtcataaaagtacctttacccatattgtcatttttttaaaactctgtatttataaattttctataataaaaaataataacacccttaaaacaagtagcaaatgcccttcaacagttccaatctgacccggtccttagatggaattgtaccctacagaattgggaaggggtggggaacagagaaaggtgtgattttttttcttttttcctgtgttcatcttgagcaatgcatgtgcaaaatatcttttctggatgcatcaagtgaatttaatttaggataaaaaaattgagaggaaccaggtttctattataggactgtggtttgtggtggtagctggtggtccccactaggtcgaaatagtttccgtacaacccctagatgaggaagatgcaggaagccttctaggaagtaccaactcttctttttctccttctttccctgatcaaacacccagggccacgaggtgtggccagcttccggaggtccaacatagcttctttgtggagcatgtggaagtgcagagataaaggttggtgtgtccaaccatcacttccctttattgttgaacttgggctgacccatgaggagcatagagactctgcccagctggctcgatatgctcagtgtggaaaatgaggccctttggtttcccaccagagtatgtcttcatgctgtattgcctaaaaggacctaagaagaaacattcatgcaactgaaggtttttctgtctgtatgatttttttagaattgcagatgtaatatacacgtatcataatttcaaacaagacaattagatgaaatgtaagcaagggtaaaggatgggcagtgactctgggagtcagatgaacccgacaccatttctgtccaggtcagggagatgtctctttgtgcacgtgtgggaggtgctgtacctgagttgttcaaagtgctgggggacagtggatgaactctgagaccgagatctgggtgtgcgcactaccatagacatttaaaccacacgctgcctcttcacactgtgcctcccctgtgtccctcccagccaccagaatttttgcccttctctgcctgacttctgtgctccaggaggctaactctaaaagactgcagacccattgccctctggatttgggtcaagactgaacaccgggaggaaacaggagatggagggcaggaggagagagagccaggatatgtattccctcaggttttctccttccaagatgacagacccccccagcagggccctggctctccatccttaaatgcctagataatgcataatagctttccacggttgctattatattacctgggatctttaacatcccttagtggctcctttaaccctgccccacttctaagaagtcccttcatggaagtcttggcctggcagcggtctgaaacatccatcctgttgaaatgaactgtttaagtttctgtctctttttccagactttgagaggggcacaaaggcagggaacatgtccttttaagctttagtgcagcgcttggactgaactaaattgttgggttgactaggggtgttgcgacattttattgagatgatcttagacctggattttaaagggcactgctgcttgcgtgtgctgtctggatgaacacatgattgtaccgagatgaggttttagcctacagggaacaaggtccaggactatgtagatcatgttgtacaatacccagggcagcatgagtccgcttagggtctgaatcacactcttttgttgatattgatgcagaggatactggtcacaaaactgatgatgatgttgatgataatggaatgtccatttactgactcagtcagagtcacaggaggatttaattttagtactggtttattgcaaggtaatatttgtttttttggtcctttttttttttttgagacagagtctcactctgtcacccaggctggagtgcagtggcacgattttggctgactgcaacctctgcctcctgggttcaagcgattctcctgcctcagcctcctaggtagctgggattataggcatctgccaccatgcccagctaatttttgtatttttagtagagatggggttttaccatgttggccaggttggtcttgaactcctgatctcaagtgatccacctgccttggcctcccaaagtgctggtagtataacaggcatcagccactgtgcctggcctcagtttttgtttttttttggagacagggtctcactctgtcacccaggctggagtacagtagtgatcctgagctcaagtgatcctcctgcctcagcctctccagtagctgggactacaggtacgcaccaccatgcctggctaatttttaaaacgttttgtagagacaggatctgactatgttatccaggttgggtctgaaactccaggcctcaagtgacccacccgactcaaccttccaaagcactgagatgacagtgagccaagattgcaccactgcactacagcctgggcaacagagagagactccatctcaaaataaataaataaatacataagcaaacaaacaaacaaacaaataaataaataaataaataaataaataaattctggctgtgtctacctgggtatgggattgattgatccatgactgggaaattttggacaagtctgttagaaagaaggtgaggggctcttcttgaaaggctcttaagaaggtagtaggccaggtgcagtggctcgcgcctgtaatctcggcactttgggaagccgaggtgagtggatcgcttgagctcaggagttcaaacctgggtttctatcttgatgggagtgctggtaaacagggaaataagtttgccaaaactcatccaactattcttaaaattagagcatgtaattgtatgtaaactgtaccttgaatataaactttacctcaattaaaaggtttatgtccctttccatttaatccctgacccaaaccctccaaatttcttttcttttcttttctttttgagatagattctcgctctgtcgcccaggctggagtgcagtggtgtgatctcggcttaccttggcctcccgggttcaagtgattctcctgcctcattcagcctcccaagtagctgggattacaggtgcctgccaccacatccagctattttttgtatttttggtagagacaggggtttcaccatgttggccaggctggtctcaaactcctgatctcaggtgattctcccgcctcggccccccaaagtgctgggattacaagcatgagtcaccatgcccgacccctctaaacttcttgaccttgtgtccaacaaactcctagtcaccaccctcaaattatgctaatccttgcctctgcaccttttcttgtgctgttccctgtgaggaaacttagcttgcccctacacctggttaacttcctatcttcttttaagactcctcttccaggaagccttcctgatcttctcttccattcaggatgggtgaggtgcctttccacaaaatcctgtattgcattgactacatcttcatcacacatagattttattttataacatttttgtctaaatattctttttccactttaaactctgagctctttgagacaggaactgggtcatattctttttttcttttttatatttgtatttttctggtcttattctcatagaaaggactgagtcatattctgctttgaattccagactctagcaaaatggctggcaaacaatatgtttgttgattaaataaatcgatgaattaaatcaattttttcccctaggacactggcatgaaactttgaataccatattatatgacaggctctttcagttgcaagaaacaaagactcagatatgtgggaggattccagaagatacccttgcccttggtaaggcactgacccaacttagtccgaggggcttgtctgtgtcatggcccctctgctgctctctgttcagcttgttgcttccctttttttcttttcttttatatgtatattttttgagacagagtctcgctctattgcccaggctggagtgcaaatctcagctcaatgcaacctctgcctcccaggttcaagcgattctcctgcctcagcttctcgagtagctgggattacaggcatgcgccagcatgcccggctaatttttttgtatttttagtagagatggggtttcgccatgttgaccatgctggtctcgaactcctgacctcaggtgatccgcccgcttcggccccccaaagtgctgggattacaggcgtgagcctccgcgcccagcctgtttgcctcccttttctgatcagcttcctctgctcacctttcatttctccttcctcataacttcagcttgcatttggtctcagcttcctgtggccctgactttatctgactcaagttggcatttgtgaaggtaataatctaacaagctcctctccgtttttcagatccacatcatggtcctatcatgtggggaactggcctctggtccaatgagcaaagatgggtcccacaaaatgtagttgcttggagagcagggcctgacagaaggggtggggaggagagtggcaggcactgaggcctctcctattctattaatgagcaaagtgccttttatttttgcctctctttgctcctgaataatttttctcatccttcattttaggaaagccacttatcttcttgatgcttagggtttctagagacaagggatgttgaagctggaaggaacttcatagctcatcttggtcagatcccagcatgtgctctgtataacactaggctcaaaagatgcttcatgagaaaaaaaatcaagatattccagcattttctttggatttaaactcacaccaggctcaaaagatgcttcatgagaaaaaaaatcaagatattccagcattttctttggatctcagctcacaccaggagcatacttctcagtggttcaatttgcttggcaggatctctggtcttctgcttggatggatctctgcagggtccagcgtcctctaaattggaggctctgaatcagggattcctgaaaaggcacaagagaggcccaagcatgaacctcttgaaattgtttgcaaacttcagtcagtgttgtgtacatgtgcatgtgtgtgtgttcctgagtgtccatagctttcatcagattcttacaggtaaatatcacccgagagaatggataagaaccactgcttttttttttttttgagacagagtctcactctgtcacccaggctggaatgcagtggctcagtcttggctcactgcagcctctgggttcaagtgattcttgtgcctcagcctcctgagtagctgggattacaggttgctccaccatgctgattgatttctgtatttttaatagagatagggttttgccatgttggccaggctggtcttgaactcctgacttcaagtgattcacccgcttgggcctcccaaagtgctggaattataggcgtgagccatcacacccagccaagaaccactgctttaaagggacattggttgactgtgccttcctaaggtaaaggccttcttgttttcttccaacttaaacattttatctgctacactcaataaccatcgagtatgtttaagagaaagtgctttatataacaaagcagaaaggctcttgataataacttagaggcttcatccttgcatttttctcaagatgaaaacgctaacataatgagctgtcaaggtaggttcatcaattgtaacaaatgggccactccagtggaggatgttgatcatgggggacgctgtgcgtgcgtggggagaggggatatatgacgtgtccctataccttccgctcaattgtgctgtgaacctaaaactgctctaagaaataaagtctattaaaacaagcaaaccagccagctgcagtggctcactcctgtaattccagcactttgggaggccgaggtgggtagatcgattgagcccaggagtttgtgaaactccctctccacaaacaatttttgtaaaaattagcggggtgtggtggcacgtgcctgtagccccagctactggggaggctgaggtgggaggattgtttgagcctgggaggttgtagctgcaatgagccatgattacgccactgcactccagcctgggtgacagagcaagaccctgtctcaaaaaaaaagttaaacaacaacaaacccaacaaccaactaaccgaaacactaagaatcagagaagtaaaatataattcgcttcatccagacagctagcccggtgaggactacaaccttcctctcttccttcttcacttctttgctctctctttttaaacccacatcttagcaattcctctgctattgggtcattaaatcgccacctctaatttttttttctaagcatttattgagggccaagcactgtgttacacatctcctcattaaaatggtatagcaaccttttctggtcgatattatgatcccatttttcaatttttacttttgagtgaaggacattgattcttagagattgtaaggaacttgcccaaggctgccggctggttagtggcagagctgggatgggaaagtccgtattttccaccgcgctgtattagtgagggctctttgtgtcacttctgtgcataactccgccccaagttaaaaggctcgctgctctcgacaggtcctcctcctcctcccgctaggtcctcctcctcctcccgccaggtcctcctcctccttctcctcccggggccctgccctgcgggtctcacctgctgctccgcggggtcccggcgggggccggatagcgccccctggcggcaggtgggcgcccgcgcagcgcatgctaatgagcccgcggcgccgctcgcggattggctggcgcggattccagctgctttccaagtcagcggcgcctagtgagagtcaggggggcccggcccgcgccctccccgcccagccgcctccccgtcgacgcccagggctggggcgagccaggctgcctttcgaacttggggggcttctcctcttgtctcccactggtgctctggctgtgaatccatccaggggccaggatgacaatccgacaccaaggccagcagtacaggccgaggatggcatttctccaaaaggtaaccctggcccctcacctggaccctgggaggagggcgggggaccgcatctgcgaagcgtccgaggacaagaggggcaggagtggagagcacccctttgggtcgatttgtgctgctcgattttattaagtgacttctttgctgtgtgtgtcgatattgatggctataataattaggttttcgtgtgccctgcctgtagtggagaatctgaagccagcgctgatggtctgcgggaggtgaaaacaacctgttactcgggagaggcaggttcagttcaggctgtggcagatttgagacagcctgctgatattgttgtaagacgaccagatgtgacattgccatttttgccttttttttctgatcccaaactgcactattttaaagtgtgtgtgtgtgtacacatagaccatgaaaacggggtgatttgtaggataaagggccaccccatttacaatgccctgagagccctcatttgagtgtgtctatctgtgcatctcctgctgtctgcgctggcggcagaagtcccaaccttttcgcttcccttgcgaatgctttcccagacaaagtgaccgggcacagggtgtgcacacaggatggacatgtgggaggtggaatgcacctgtggggtgatgtgtttggggacaaagtggttcatttagttctgagcttctggtataatcactgtccgatgagatctacagaggattaggtcccgggtcacatctttgtccttcctcccacccgtagccacttttcacagcgtagtgtccatcttcttaggcttatcttgttgagtagaattagttgaatgttttgtgacaagctgagctctccctgagcccctggagctcagcaaatttgtatagtcagtgaccgctgtcctgatttgcccaggactttcaatgctaaaacctggacagtcctggggaccccgagacggtcgcatttggtccacctgtttcaagatgctcgtgctcatcttccgggtagcagaggtgtgggtatcatctgtaaagcagacaggctgaatgttgtctcactcagaaagaaccctgagagcctgtattgcagataccagttactaaaagcagaagaaactgcctaagtcggctatctcaaagccacacatcatcttccaggatttatcctaggactgtctcctcccaggcaggacagctctggcttgggggctcagagggtaattgtcaagagataaattcagtttgtttattgaatctctggcattcttttccatcatgactcttctctggtagattctcctctccttaccttggtcttctgactagtgtcttggtctctagtttctctcctccaccccaggcttccctcctcctccccagccacccctcctccaccccagcatcccctcctccaccccagcatcccctcctccacccaaactctccctcctccaccttagtctcccttcctccaccctaacctctccctcctccattccagctcccctcctccaccccagctctcccccctccaccccacctttccctcctccaccccaggtcctcttcctccaccctgtcttccccttcctctaccccatcctcctcctcctccccagccttctcctcctccatcctaacttacctctcctctaccctaacctccccctcctgcatcccagctccccatcttccaccccggtctcccctcctccatgacagctttcctacacacactgtttttttcccccaaatcaatggtgacctccttgacctgaaacgctccactggcttcccacattcccagcataaagtccaaccttcccctgagcagcctggttacccaggattccgctcccaccatcttcctggctttgcctcctgcctgccttccacacctgccctctgggaaacaacaaagcagccacaggcacccctgggctcctgcctcaaacacttccttcctttttaggaacccggtgccctttcatgcctcagggtccgtctgctgggaaagtcctttctccccctctcgcttgccaagctccacttctcttcccatgcccagctcagtcacccctcggctgtgaaggctggttctcctaatgcccctgggcaggacagctcccttctctgtgcactacagaccttgccacacctccagcattgctctttccctagaccttgtgctggcaagggccctgtctatgtatcctctatatctatgtatgtattggtcatgtcacagagctccttggagcagcagacagaataaaggtctgcagaacaggtctcaagagcccatgccaggcgatccttaatgaagaaccagctacattcgatgttcagctttctggagaagggcctggaacaaaaaaatgtggacctgggtgcaactgtcactcatcactcgttccatgcatgtgatgaagtacacggtgtccatgatggtgtggaggggtgggcattatgtgcattatctcatctatttcattagctggaggttatggccaccattttacagagaagaaagctgaggctcagagaggctaagcggcttgccagtcacgcagcactaggtggtgaaaccaagaagaaatacaggagtggtcgttgtctgtcacaagttgtggtgcaatgccctgagctttcccatgacgtagggcagagtgtggaggctgtgggaaagcctggctcagtgtgcttagggacacagagctgagacctgaaggatacatagggtttccaggcagaaagggaaagatgtttcaggcagagggaacagtttacgcacagaggcatgggaaagctagtgggtttggggccatgttctgtaatggatggattttgaagtgcaaggggagtgggaagctggaaaggaaaggcagaggtagtgggtgcctatgggccttcaagaccttttaaaggtttggttttatctcatacggagccactatagaaattggaatgggcaagtgatatggcagatttgcaaattaagaagatcactggtgggccagttgcagtggctcatgcctgtaatcccagcagtttgggaggccaaggtaggtggatcatctgagatcaggagtttgagaccagcctggccaacatggcaaaaccctctgactattaaaaatataaaaattagcagggcgtggtggtgagcacctgtaatcccagctacttgggaggctgaggcaggagaattgcttgaacccgggaggtggaggttgcagtaactgagttcacaagttcttgccactacactacactctagcctgtgtgacagagagagactctgtctaaaaaaaaaaaaaggaccactggtgtgagccagaggaatgggtggaatgccttctccctgaactaagagagttcactcaggatcctcctgtgcccctgcagctccaacctcttgagaaatgacaactgtcatggggccatggagagccatactggtcagaaaggaccgtgtgcgattcccgaggttctcacacccatgcctccatctcagtctcaatgcagctgtgggtcgggatgcccgccggccatgctgcttcccacctctgatgcctgggctcgtttcagatgtggtagaaagaggcagaaggcccatctgttcatggctttgctggggaattagctgatggcacacagtggacagatgaacacaggtgggtggcctcctgtggttccagcacccatggactcttgttctggggatggcccattcccctctgcaattaccagatcaccatcccagccagtaccaccaccgcccttgggattcaccatgggcgaatttcttggactttcttggagaagccttctggtgacagctttgttttcctgtgcggcttctggcatctctttttgcctgagaaaggaatgcagaagcagaaatattgaggatatccaggccgagtttggtatctcttgcttgtaacattctttcattcaatacagacatataattgggtacttatgggctagatgctgtgccaggtgctgggagcaccaaggagcttagagtctagtggagaaagacagatgtataaacaaggagacaagaagtgttccataggctgtggcagacattgttggaggatacatgtgacaccaagcagggagtggtcagttctacctggggtcaggggggatcaggacagattttacaagggggcttgcaatggagtcgaattataaaaagtcagtagtttttggccaggaggttgaggaaatgagtgacattttaggcaatacaaaacagggacatgtgaagtagcatggtggtttgggagattgcctgcgggttgggagagctggccccaagtgtacaggaagtgagtttggcgttgatggagaagactggtaggtaagaaaggcccagatctgctgggtgcagtggcacatgcctgtaatcccagtactttgggaggctgaggtggacggatcactaggtcaggagttcaagaccagcctggctaacatggtgaaaccaaaaatacacaaattagccaggcatgctggcatgcgcctgtaatcctagctacttgggaggctgaggcaggagaattgcttgaacccaggaggcggaggctgcagtgagctgagatcatgccaccgcactccagcctgggtgacagagcaagactcagtctcaaaaaaaacccaaaaaccaaaaaccaaaaacaaacaaacaaaaagaaaagcccagaactggagggcttcctaggtcatgctacagagtttgatggcttctgtgtttaatgagaagctgtttgacgttttaaaatcagggatgaataagatgagttggtttatatgctagaaagatgattctggtgagagggaatgagtaattctcaacctgggctgcactttaaaaaacattaatatcaactcactctactttgagtttctgatttacttggcctggaagtgaggcttaagcattggtctttttatgccactgtttttctcccttcctttcttttttttttttttttgtttgtttttgagacagagcctgtctctgttgctcaggctggagtacagtggcgagatctcggctaacggtaacctctgcctcccgggttcaagtgattctcctgcctcagcctcccaagtagctggggatactgggacctgctaccatgcctggctaatttttgtgtttttagtagagacggggtttcaccatgttggtcaggctggtctcaaactcctgacctcaggtgccccacctgccctgcctcctaaagtgctgggattgcaggtgtaaaccacaaagcctggcctggttttctttttgtttctttctttctttttttttcttttttaacaatttctttttttagagatgggttttcactatattgcccaggctggactcaagctcctgggctcaagggatcctctcaccttggcttcctgagtaatttcatttacaggtgcctgccatcatgccaggcttaaccattgctctttttgaaaagttttccaggtggtttgaatgtgcagtcaggatgagagcctctggggacatttggcaatgtctaaatacattttaggttgtcataactgggggtgctcctggcatctagtgggtggaggacatgaatgctgctaaacatcctacaacacacaggacagccgccctcaccaacccccaaagaatgatccagctccaagcgttgatggggccactgttgagagccctgggctaaggagcaccccggaggctggagacagatgccagctcaaaggcagaacctgatagtccaggaagggggttagaagatgttccacggaggcaggattgagtgggcagagaagagatgtgttgaaaacaaaagcagtcagactgagcaacatatcaagacccatctctataagaaaatttaaaaattagctgggggccaggagtggtggctcacgcctttatcccagcactttgggaggccaaggtgggtggatcacttgagcccaggtgttcgagactagcctgggcaacatggtgaaaccctgtctctaccaaaaatacacacacacacacacaaatgagctgggcatgctggcaggcacctctagccccagctactagggaggctgaggtgtgagaatcacttgaacccaggaggcagaggttgcagtgagccgagattgtgccactgcactccagcctgggcgacagagccagactctgtctcaaaaaaaaaaaaaaaaaaaattagctgggcagggtggcacatgcctgtagtcttagctatgggatgctaaagtgggaggatcacttatgcccagaagtttgaggccacagtgagctatgatcatgccactgtactccagcctgaaaaaaaaaaaaaaggaaacaaaagcagattcaacaaaagttggccacatcttggctggggtcacctggaacgattcccaggcttttgaatcggtgggaagagcagattttggagaaagactaccgagcactggttagggcatggtgcctcatgagtgtctgagcgtctgcgagacatcgggtgagacagcgggagggtggctggactctgtgtggccaggcttattagcaggagtacatcctcctctgttagaaaaacaactctgcggttctgggtcacttttcccatctttgtatagaaaagtaccgattattattgttcccccgggtgccttctccagcttaaaggaaaattccagccccagagatcttccgcagtgagtgacagctccttaatgtgaggagcagcgtgggcgtggtgggtgggatgtcagagccatcaaagccctcatttctgatccctctgtgatgtcggggttccctggcacgcccactgtcatgcctcagcacattggcatctgagagaggaaaggtgcagctgacaccctgacccccttctccccgacacggggtcagacagggtcccgcggtggcctggttgtgcagcactgacatgttgcctgggaacgaagcggggctgatgctttgtcttgggaggagctgggaagcagagtctgtttgggagtgagagtgttggcctttgagggtgagcatgcccccaaggacacaaggaggagagtgcaaggtctgctgaagtttgcagcagaatagcaagggcatctcactccctggagaacttgggaaacagttcagattctctcccctctgtgcaggggaagggatgtttctgattgaatataggacacagagtctgtatgagtttgtagggctgtcgtcacaaagatgcatagactgagtggcttaagcaacagaaacttctttgctgacagttctggaggctggaagtctgagatcaaagtgtggcacggttggcttctcctgaagcttctctccttggctcgcagatggccgtcttctctctgttctcacatcatcttccctctgtgtctatctgtgtcctaatctgttctcataaagacactggtcataggggattagggtccactccatgacctcatttcaccgctttattttatttttttatttttattgagaatgagtctcactctgttgcccaggctggagtgcaatggcgagatcttggctcactacaacctccaccgcccgggttcaagcgattcttctgcctcagcctctagagtagctgggactacaggtgccccccaccacgcctggctaatttttttgtatttttagtagagatggggtttcaccttattggccaggctggtctcaaactcctgacctcatgatccaccggccttggtttcccaaagtgctgggattacaggcatgagccattgtgcccagccttatttttacttttttgagactgagtctcactctgttgaccaggctggcgtgcagtggcttgatatcgtctcagtgcaacctctgcctcccgggttcaagcgattctcctgcctcagctcctgagtagctgggattgtagcctgccaccactcctggctattttttttttttttaatatatttttaatagagatgaggtttgccatgttggccaggctggtctcgaactcctgaccttgagtgatctgcccatctcagcctcccaaattgctgggattacaggtgtgagccagtgcacctggactcatttcacctctttaaagaccttatcttcaaaagcagtcacagtctgaggtactggggttaggacttcaatgtacgaatttgtagggggacgcagttcagcccatagagctagagttctgtggtttcctggggagactgaggagacgcctcagaggaatttgtacggggaaaggtctgaggaaaaaggatcggatcccaatgggccgaactccctcaaaatgttcccgaggtccacgtgacgttccctcctcccacccagcccttctttctgtgaagggtgacacacctcctagaaagaaatctgactcccctcattgtgtttttaaaataactctcattattcctcctctgaaggttattttcaaactctttataactcgatttttttttaaatgcaaagacaaggaatcaaatctgccaactttctatcagagaaactcgggtttctaacttttaaagtgggattatatgtcttctccaatatatgggctccctgcttttataacatgctgctgttacatctaataaaaaccattttgaatgaaggcagcctttcatccggcagctaatgtgggaaaaaggagtcttgggccctcatattagaaaatcttggcctggcgtggtggctcacgcctgtaatcccagcactttgggaggccaaggtgggcggatcacgaggtcaagagatcaagaccatcctggcaaacctggtgaaaccccgtctctactaaaaatacaaaaattagctgggtttggtggggtgcgcctgtagtcccagctacttgggaggctgaggcaggagaatcgcttgaacctgggaggcggaggttgcaatgagccaagatccgccactgcactccagcttggcgacagagcaagactgtctcaaaaaaaaaaaaaaagaaaagaaaatcttggccgggcacggtggctcatgcctgtaatcccagcactttgggaggctgaggcaggcagatcacttgaggtcaggagtttgagaccagcctggacaacatggtgaaacctcatctctactaaaatacaaaaaattagcgtagtggcgcgcgcctgtagtcccagcttctcaggaggctgaggcacaagaaccgcttgagcccaggaggtggaggttacagtgagccaagatcatgccactacagcttgggctacagagtaagactccgtctcaaaaacaaacaaacaaacaaaaaaagaaaatcaggcacttcttgggtaccatggagacctgaggtcacagttagtggagaactccagaaggagtcactcctgcagcctgttgcctcctcagttccctgggccacccccaggagcagcagctgtacctcccagtgccccgcaaacaccctcctggcgttgtccctttgcttccctcattgctgctggacctacagctgacccagtgacctcagatgctgccaagtcctgacactgcagatggccaaggactatggctctgagtcaagccaaaataagtattttctgttccaaaacaattctgtgagccgagaatgtgtccgtgcagaggaagctgacagtcagtcttgcaccaggagtccctggagctgcctgggtctgcacgctggctggctgtgtgctcagagtggcctcagctgtgtacctgcccttggcccatttcttgaaatcgtggttcagctgcaaatgctggtttagcaataaagattgaaatagggaatctcacccctcagcatcaagttaggtcatggtcccacgctccttgggaaggtgggagcttcccagcttcaggctgcctgagtgacaggtggcaggtagcatttttccacttcaggactcccttgaatgacccgtcaccttgaatgcacctggatcattctctctctcttttaaaaactttttttttttttttttttttgagacagagtctcactctgttacccaggctggagtgcggtggcatgatctcagctcactgcaacctccacctcctgggttcaagtgattctcctgcctcagcctcctgagtagctgggattacaagcatgcgccatcacacccagctaatttttgtattttttgtagagacggggttttaccatgttggccgggctggtgtcgaactcctgccatcaaatgatctgtctgccttaccctcccaaagtgcagggattacaggcatgagccactgtgcccggcctctctttaaaaaatttttattttattgtggtgagaacatctcacacgagatctaccctttcaaaactttaagtgcacaatacaatattgttgatgaggtacaatgttgtacagcagatgtctagaatgtattcatctcatttaactgaaagttctttatgtctgttgagtagcaactccccagtttcccttctctctaacccctggcaaccaccattctgatatttgatctatgaatctgtctattctaggtacttcatgtaagtggaatcgtgtggtatttgtccttctgtgaccggcctatttcacttagcataattagccctaggttcatccatttgcttgcatattgcagaatttccttcttttcgaaagccaaacaatgttcttttgtatgcatagaacacattttctttgttcatctgacagtggacacttaggttatttccacattttggctaacgtgtatagtgctgcagtgaacatgggagtgcaggtatcttttccagagcctgatttcaattcttttgggtacatacccagaagtggtattgttggatgctgtggtagttctatttttaatttttctgatgaacctccatactgttttccacagcagatgcaccattttatatttctaccaacagtgcacagggttccaatttcaatctctttccatttctgaattaagaaacctgagtccttcttataccacccctcccttggagtgcggcctggtcctcaccatctagggagattctgttggccctctctgcactttttttgggatcatctcagccagtctgcagttgctattttttttgtgggtaggtgtggggaggaggacaagggctccctgtgttgcccaggctggtttcaaactcctgggctcgagtgatcttcctgcctcagccttccaggtagctgggattacaggcatgagctaccatgtctgacttgcaattgctatttcataaatactttgtgcacagaatgatatgaaatgctttgtatgcttaatctcatttagtctttgcaatatccctacgatgattggttttggtgttttttttgttttgttttgttttttgaggcaaggtctctctctgttgcacagactggagtgcagtgacgtgatctcggctcattgcaacctctgcctcccaggttcaagcgattttcctgcctcagcctcctgagtagctgggattgtaggcgcccgccaccatgcccggctagttttttttttgttgttgttatgtttaatagaaacgaggttttgccatgttggccaggctggtctcgaactcctgacctcaagtgatccacccgccttggcctcctaaaatgctgagattacaggcatgagccatcgcaccgggcctgatgctattgcaagttctattttacagataaatgagtcctagtgaaatttagcaatttaccaaaagcctctagcttctaaattggagcagagatgtgaaactgaactttctctgcattcagactcctagctttcatattagttaacttttcattttcatgtaactgtctgctcaactttctgaagactgggtgtatgtcttttaccttgtatccttgcagtgcagggttcttaatacatgctcaataaatacctatacttatttggtttgttgacctgggtttctattcctgggcacctaaacacaaccctgcatgcaaagtttcaaaatgtattagtatgaatgctactaatattaataattctaaccataatagtgaacatatgtctctcctgataaagcatatatcttcatgcatacataacatatatctctccttatagagcattttacataattaaattctaagggattataaagtcacaaattaattaaattctaagagattatagaattctttagtagtccacatcatggtccccattttatggagagaaaggagattcagagaggttaagtgagttgcccaagatcctacagttaatagagaaagaaagtcccatggagactgagtgctttttctttggactgcaagcaagcaccttcagatcatgaaaggattttgtaaattgtaatgagccagacagtgttgggagatgttgtttaattcagtgccagaagactaatgatggtgtaagcaaggtggctaaatggaggggaagcaggtaaatggatgagatgttttactttgggtaatggcgggaatgtggacagacttggtgtgagagcagccatccacgttgatgtccagctgcacgcagcagcccagacctcaggagagagccctgggccaggtgaaggcaggaaagggctttgtttcccgctgctggttcatgttctgtgcttctgcttctgtggcccttccacctagaacaccctcacccatgctccttttctctttctgcttcctactccttgctaatctttgtaaaattcaacctaggaggctgggtgcagtggcttatgcctgtaatcccagcactttgggaggctgaagcgggtggatcatttgaggtcaggagttcgagaccagcctggccaacatggtaaaaccctgtttctactaaaaatacaaaaattagctgggcgtggtggcgggcacctgtaatcccagctacttgggaggctgaggcaagagaatcatttgaactcgggaggcggagattgcagtgagctgagatcatgccactgcactccagcctgagcaacagagagaaactcagtctaaaaaaataaaaataaaaataaacctaggaggagtccttctctcctgcccagctctaggcactgctgtgttcacatgacaccatagactcacccttgtcattgcatgttctgcattgtcctagaatatctttgcactggtcagttagatctttgggctcagggaccacagcttctctctggtttcccagagttgatcatgactgtgcctggatgtcgaatgaccagctgaccattggcaagcacatctggggcagggggagtggacagctttcccgttagtgagggcttttccaggggaacatgaagtttgaaacctctgcacatgaagctttgtcaagatcagtagcaaacagcgaataacaagagaaacacctgggttttctctagtcatctttgttgactagtgtcaaacatccagtttgtttaaaaaaaaatccttcacgccaggtgtggtggctcatgcctataatgccagcactttgggaggctgaggcaggtggatcacttgaggtcaggagtttgagaccagcgtggccaacatggcaaaaccctgtctctactaaaaatacaaaaattgactgagcatggtgtcatgtgtctgtaatcccagctactcgggaggccgaggtaggacaattgcttgagcccaggaagtggcggttgcagtgagccaagatcgtgccactgcattccagcctgggcgacagaggaagacctgtcccaaaaaaaaaaaaaaagagtccttcagctgatattatttccatttgattttttcaagtgggaaataatttttaataataaaaatgaaaaaaacaactctaaagatagtcagggctgtccctgtggctgccttcctgcagtgcaggcttccttggacagtttgttgattctctttagcttcaactctccctgacattcatggctctaattcatatctctgaccctgtctcttctgaacctggggcagtcatttccaatcacctcccagacattgtgggaatctcagaagccccttacagtcgaccttccaaggcagacacctttgcttccagaagtggcttcttctttgcattttctagtttggtaactggtaactctggtcttataagttataaaccttggcattattctgtgtcacccttagtgaacctttcaatcacttgcaaatgcagtttattttcgctcttccagggctctgaaagtcatgcctccttaccatcttcctggccactgcctcatttatttattaattcacacatcacttgcttactgggtactatctatgtggcaggcatgcttcctgacacttgacatccagcagcaaacaacaacagaaaaagacccccaggaagagcttgctttccaggagctaggggagatgcaccaccgacaatgtattaactaggtcaattattttgtatgtttgaagaccacacatgctcttgagaaacggagcagggcgtcaggagtgccaagggtggagttcagggttgcagctttaggaatggtcagggtgggcctcctgagaccatcagaaggggaagaaggtgaggagggagccaagttggtctcttgcgaagactggcccaggtagagggaagagccagaacatgggacccgcccaaggctggctgggagtgtccttggtatggctgggggaaggaaggtggccagtgtggctggatcagagggagccggtggggagtgggtaagaaagaagtcagagaggaagggggtcccgaacatgtagaccagtaggggaactttatcatttacttggagtcaagtggtccttgcagtggaacagccacgcagaagagtgacatattctaaaataatggaaagcccatctggctgctctgctgagaatacaaagagtgggagtgttaagggttgaaacgctgtcatttcttttcttttttaaaaagagacagggtctcgctctgtcacccaggctgagtgcagtggtgcgatcatagctcactgtagcctggaactcctgggctcaagtgatcctcctgcctcagcctcccaagcagctgggaactacaggcatgtaccaccacgcccagataatttttaagtttttcgtagaggcagggtctcactatgttgcccaggcaggtcagaaactcctgggtttaagcgatcctcccgcctctgcctcccagattttgggattacaggcgtgagccactgtgcctggtcactgtcgtttctcacctgggctgtatgcaatagctttgaataggtcactgcacttttttctacctctgcaaacttcttcacacttcagtgttcttctctctgtcatgggccaaatttccagaacgctctctaggaacagtcactggaataaaatccacactgcaggggtggctttgaggtccatgtggtctggcctccactggcttttccagctgcaactcctgctgttttctgttccactaaccctgggagctgtcatccttccatgcctttgcccatggtgttctatcactttctgttcagcaaaatcctttcttgttaagctccatctttccttaaaagccaccccagaatctcccagtcaggatgaatctgcgagtcttcacatgcagggatgggatctgtgtctgtggagcacaccttagtcctggttgcattagagtcactcagtgcccacctggctcctgtaccagatggggaacccctgtgtccacctttgcattttgaggtccctctcagtgcagtggaaattgccctgcacaactttcaaaattgttctcgtcagtcggctttttcctgttctgtcttgcagattgaagcgctcgtgaaggacatgcagaacccagagacaggggtccgaatgcagaaccagagggtcctggtcaccagcgttcctcatgccatgacaggtgatgtagcttgcactttagtcttggcctggaatagaccccacaggcccaatacggcccacctcctgtgtttgtaaaaaactttatttttggccaggtgcagtggctcacgcctgtaatcccagcactttgggaggccgaggcgggtggatcacaaggtcaggagatcaagaccatcctggctaacacggtgaaaccttgtctctattaaaatacaaaaaattagctgggcatggtggcaggtgcctatagtcccagctactcgggaggatgaggcaggagaatggcctgaacctgggaggcagagctttcagtgagcagagattgcgccattgcactccagcctgggcgacagagcgagactccgtctcaaacaaaacaaaacaaaacaaaacaaagctttatttctaaataaagttttattggaacatatccatgttcactcatttatgtattgtctatggctgctcttacactacaatggcagagttaaaatatatagttgtggccaggcacagtggcttacacctacaatcccagcactttgggaggccgaggcaggtggatcacctgaggtcgggagttcgagaccggcctgaccaacatggtgaaaccccatctcttctaaaaatacaaaaattagccaggcatggtggtgcatgcctgtaatcccagctactcgggaggctgaggcatgagaatcacttgaacccgggaggcggagtttgcagtgagccaagatcgcaccactgcactccagcctgggtgacagaacaagactcccacaaagctgaaatgtttatttactatctagcgctctacagagtacatttgctgactcctggactaaagtcttcctctgaggaaggggtcaggagggagaaaaggactcaacaggtcatttcttgaagccattcctcccagaaggtcattttagaaaccttcactgtcattttttgttttgttgttttgtttgctttgttttaatgaaaccaagtagcagaaaaaaaaatactatttagcagaaaaaagttggcctttgttttgctccaccgtttaccttctaattcatttcaggcccttctcaactgccctgtgggagtggtgccactgtctcctctctgtgtgtgggggtgaggtgcctacagagcatcatttggggatattggcaagaagggctggacgccaatattaagagagcattttggttaatgtgttacctgttttctgatcttgattttgcagtaaagacaatgtttcatacttaggcgtattgcctgcagaagcagacagcttctcatagcccaagcccgggcctcaccacggctgtgctcaatgtgaggcctccctctctatgccacccctgacctgactatttatttttcactcaaggtgccctagtctttgcagagacaagctggctcacagcttcccctttccctttctgactgcttagaagaaaggatgcccccaccagcaatgtgtcactcaggtttccttgcatgcaagcaacagaagacccactcttttgttggagcaaaaggggaagtaattgaaatgctatagagcagctcatggaggaaaaggaaacactgacaagccagactttggaaaggccaagaaccagcgtagctctgggcacccaaagagtggaaacagggggcagacttttcagggtgcctttgtgtcccccatcacctcagatgcagctggggcaattcttcctgaaggcatccctgaccctgtccccctccctgcctttgactgtcattaattttggcctgaattctctactggactggggccctttaagggaaagtaccttgtcttgctcatctgggtaatcccaatgcttctcagagctgtgtttgtaacagatggttagtaaaagtttattgaatgcatgagtcacttattgtctgtccttgtgtggagagtgaaggattaaatccttcaggtgtcttttctagctgtagccctggtctcagtttactttctccattgtttttgtttgtttgttttgttttgtttgtttgttttgagacagggtctcatgctgtctcccaggctggagtgcagtcataaaattatggctcactgcagccttgacctcctgggctcaagtgatcctcctgcctcggttttccaaagtgctgggattaccagcttgagactccacagctggccagttttctcatttttaatgcaagaatggcaatccctccctaagggaacgagtgcaggaaggaagtgagagagttctgtgcaggtgctgagtatgcagtgggtgctggatggtggtggtagctagtgctttcccacacattgtctgttaacactcacaataaagttaagggtagatatgactgcccactttttgcacatggggttatggagaccaaagagtttcagcaacttgccttcatgtccttaagctcatttcatgagtgagcttgaatttcagcccagcaatgtgactccagagtccatatatatattttatttttacttatacttttttttgagacagggtctttctctgttgctcaggctggagtgcagtggcactatcttggctcattgcagcttctgcctcctgggttcaagcgattctcatgcctcagctccggagtagctaggattacaggcacccaccaccacatccaactaatttttgtatttttagtagagatgagatttcactatgttggtcaggctgatctcgaactcctgacctcaggtgatccacccgcctcggcctcccaaagtgccgggattacaggcatgagccaccgcgcccagcccagagtccatattcttatctactgtcagttgtgcaccagctgctttccttccctgcacacggggcacacttggttcctggatttgggcgaggtcgcccatcctgccatggcttccttgttcctcctgcacaggtgaattccagctgctgtagaaacaacacagggagaagccctggtcctgcaacaacagcaccgataaaaaaaaattatttaacttcttggacggcaggcgtcccagggcttcctcgggacaaaggtggctgatgcgggaggctgagcagcctgccaggctgtcaacgtagaccgcgtggtacagatgctggtggcaccataatctcatttgatctatttcgggaggcagtcaagtggatgagaaagccctcggctcctcggtggagagagctaatcagtctgatgtctgcctaggtctgtctctctgcctgcgcaccactgtgtagcatttaaagagagagacttggtgtggaaagtctaaacacccagtcctaggagtttagatgaaggattttgcttttgaacagccatccaggagtgaatgatgctaagagcaacagagggagaaccatggaaagccatgacagtgtgcatgtggacactgacagagatcatggctggacatttgtgtcctagggtgtgggcatgaagggaagaattacaggttgtctacacccagccatggtcgtaggcaggcaattacgcccagagagcgtgtatatgggtcataagaagaaatgtccctgcaccgcctccgaggagggaagtatcattggcaattatccagacataagaacacagggagtggagtctcaatcctggccctcttctttgatgtgttatgtgggcctgtttccatgcagacaggcttccagcttggcctttggaaagcaggctaagattgctggaaaatgtgaccattggcatctgcacgatggtatctgtgatgcggtgcttcgttccagggcaccttgtctatcttctgagatgctattaccttgtgcctacgagctgtaccttctgcttgtgaggtgagagggcccaggctgagggaaggggctcagagcttctgtggggtcgtacggcagctctgggcttgttggtggaacttggcttgccttgacccttagataaatctgaatccttgaggggagcaggtgggtgggacgggtgtacgggtgcacattctctcctggcctctgagcccgcctctcctgctgtttttcatgccattttttcatgtttttttgtgtgttgttcccaagccagcccctaagatttgcagggcctggggcgagagtacacatggagccttcattccatcatctaaagttataaatcaactaggataggtcccaacctcctaccctgacaaaagtaccttcacaatgtcatggaaggccaggttcaagtttagaagtttctgactcctcggagttctgcctgggaacttggggagttggagagccggccccagccctcagcctgtcctcttctcatccctgtctctgttttactcccagagtcccagcttggtccagagccctgcaaacagcttgcctcgggtctgttttgtgtgtgtgtatgtgtgtgtgtgtgtgtttagacttagcctatttactatccagttagtgaataacagaccatgtacaagttatcgtcaggtaaaagatcaatacaacaagagatgtaaagatgaagcgtgtgtgtatgtatgtgtgggctgggggtgcgtgcggtgttaagttgcacatctgctggagtcagatcatggatagccttgaattacaggctgcagagctgggactgagcatgatgaggtgggggtttctgaaggttctgagcgaagaggaatgaaatcgcagctgaacgggaaggagaccagtcaggcaacagcgtggaggagcggggatgtgtcaggaggctatgacaataaccgcaaatgtctcttgtttttcaggaagtgatgttctgcaatggatcgtccagcggctttggatctccagtctgggtgagagctcatctggcactcagttatccgggacagctttgtgtacagcaccatgggagaaactaaatagagacttagcctgtgtttctgagaaatttacattttaattggacagacatgaccttcgtgtgtaaaagtaccagaatcaaaagcaaaggcaggataatttggggacgaaagagttattttgtacaaaatatttagagcataaataacagggataagtggggaggactcagtcaagaaagtcctggagggggtgctgtgtatagctggtcttgaaagaagtgatgcttgtgaattggtgaagaggagctctgagggtcttcctataaggggacactagcaagagcaatggtttagaaatggaatgagtggaaagtggaggagtgacaagggagattgagagtcatggctccagatggctatggagggtggcagaggggtggaagagcacctgcagatctgggagataggcaataggaagccacaggcaatttttgagcatggcaatgtgcctgataatcatatttcagctagggtgcctcgcagtgtcaggcctctgagcccaagctaagccatcatatcccctgtggcctgcacgtatacatccagatggcctgaaatgaactgaagaatcacaaaagaagtgatatttacatggcctgttcctgacttaactgatgacattccaccacaaaagaagtgaaaatggccagtccttgccttaactgagggcattaccttgtgaaattccttctcctggctcatcctggctcaaaaagctcccccactgagcaccttgtgaccccccactcctgcccgccagagaacaaccccccctttttcctttacctacccaaatcttataaaacagccccacccctatctcccttcgctgactctcttttcggactcagcccgcctgcacccaggtgaaataaacagccttgttgctcacacgaagcctgtttggtggtctcttcacacggacacgagtgaaaggcagcaatttagaaaatggattggagcagaaagaaactggagagtagatttcacactagaaaataggctgttggtacaatgaggcatacaactttaggacttggtctttgatggagggagcgagacctggagagggagggctggggaggaagtcttcccacaccttggaggctgagctatgggatggggagatgggttgggtccttgggctggggggtcctgcaggaatggagggatggaatcctccccagaggatggaaggatatctgctttcattgatgctttggagaaagaaccaaggaagtttgtcctttaattgatataattgataaacaaggctgtgcttccgaataaactggagcagggtgggaattaaagtgaagtgggaaggagaggaagggtctggacccgagatgcaggcagaggtgagcttgggatagaagttggcaataaacatgatgctccttgctcattcttggagtgacaaagtgtctgttggtccaacagagacattttcttcccagtcctgtgacctttcccagacccaaagggcctatagaggcttctctaggccttccttaaccatcacccgctgcagcagaccacgtgtggtttctgttaacatccagatttcctagttcccatctagacttattgagttgtcactcctggggataagacctgggaggtcctccttttagcgtgcaacccagctcacgcttgtccacagccaagttcagcaaccagtgtcctcactgctcatgagatgcagtgctgttaggaaggggcacctgtcctggagtttggggtgccgtgggggccggcaatgagctcctgtctcagccctgctcttaacatccatgtctgaactgcttttcccagaggcacagaacttgggcaactttattgtcaggtatggctacatttaccccctgcaagaccccaagaatctcattctcaagcctgatggcagcctctacagatttcaggtgagtcttggccttgaccctggctgttcatatggggttgatctcatttgaaaaggtggggttcatagtttcacagatcaaggacttcagaaatggtggagggggccaaggtggttggatttctttagtcacagggttggggtccattgagtcacaatccagttttaaagcgtggtttccctggtttcttttgcagacaccgtatttctggcccacccagcagtggccagctgaagataccgattacggtaaatacttcagccccaactatgcctttggtagtgcttaacatgctgcttatttacttgctgcactttggtgacatttgtcttgctgtcatcatgacctttctgtcagtccacatctgtactgggcatgtccccaggggcaaggggctgggtgtgctgagcgttctctccccgactctgagcacagcagcctcaggcttagggaggctgcagatggggttttgaaagatgatgatggaaaatgtcattgctttcttttccagccatctatctggccaagcgaaatatcaaaaagaaagggattttggaagaatatgaaaaggtatggaggtgcttttaagtagaggttgttataattgagtggaagatagttttgagctgtactttcctcattcccacatcactacattcatatgcgcccacattcatatgcaatccatccagccagccagctagccatccatttattaattagaagcagctagctgaagtaaattctttctcatgtctaacttcagtttctcttgctgtaatttaagcccttgcctcagtggctactgggcacacagtggctacccacttccttttgccatcccaaaacaatgtgacataataaatatgtactctaatggacaacccttggttaacagatttgaacttgaattgttttttttgtttttttgagacaaggtcttgctctgttgcctgggctgaagtacagtggcatgatctcagctcactgcaacctccaccttccaggttcaagcgattctcctgccttagcctcccgagtagctgggattacaggcgtgtgccaccacgcctggctaatttttgtatttttaatagagatgaggtttcaccatgttggccaggctagtctcgaacttctgacctcaagtgatctgcctgcctcggcctctcaaagtgctgggattacaggtgtgagccatcgtgcctggcccgaacttcaatttatgatgggaaaacaataggactgtatagacttttgttttaggctgggtgagtccagtttcccaaagaacacatgctagccctcaaaaggccaaaatttctgggtggagggttaaaatcttgctgtgtttttatttttatttatatatttatttatttatttatttatttatttgagacaacgtcttgctcaatcacccaggctggcctatagtggtgcagtctcggctcactgcaacttctgtctcctgggctcaagcctcagcctcccaagcagctgggactacaggagcacaccaccatacccagctaatttttgtattttttgtagagacaggaggcccaggctagtctcaaactcctgggctcaagtgatccatccacctcagcctcccgaagtgctgggattacaggcgtgagccaccatgctaggccacgtgtttttattcttacaaacatgttttcagaaaggccggtttatctttgttttatcttagggtttattttgtgaatttgtgatgctctgttgttgaatagtgagtttccaggttgggtgtggtggctcacgcctataatcccagcattttgggaggccaagatgggaggatcactcgaggccaggagttcaagaccagcctggcaacatagtgagaccctatctctacaaaagattaaaaaattagccaggtgtggtggcatgcacaggtagtcctagctactgaggcaggagaatggcttgagcccaggagtttgaggctgcagtgagctatgattgtgccactgccttccagcctgggcaacacagtgagacactgtctcaaaaaaaaaattgattttcaaattatttttaatctctgatgctctcttcctaatcagatttgggatacatttatttatttatttattttttatttatttgagaggaagtctcactctgtcacccagcctggagtgcagtagcacaatcttggctcactgcaagctctgcctcccaggttcatgccattctcctgcctcagcctcccgagttgctgggactacaggcacccgccaccacgcctggctaattttttgtattttttttttttagtagagacagggtttcaccatgttagccatgatggtctcgatctcctgaccttgtgatctgcctgccttggcctcccaaagtgctgggattacaggtgtgagccaccacgcctggccgggatacatttatttttacaaaagcaaagaaaaccaataaaagtgaggcttcttgtgaaagtgttttgagaattcagctgctccttgagtgaacaccatggtaaaaccagcttagataccatcgggctgggtccatggttgccatgagccaggggtgtgcccttgctgacttagagtttgttgccctgcggcacatggcatatgtcttggggctttctgttctcattttgtttttcttctttaggaaaattacaatttcttgaaccaaaaaatgaactataagtgggactttgtcattatgcaggccaaagagcagtacaggtgagtgaaaggagaccatgcttgtcctctcggtgtctttcctccctctcttccttctttgtttctttttatttattttattttttatttttattttttttttgagacagagtcttgctctgtcgcccagcctggagtgcagtggtgtgatctcggctcactgcaacctccgcctcctgggttcaagcgattctcctgccttgcctcccaagtagctgagattacaggcacccagcaccatgcctggctaatttttatttattattattattatttgtatttttagtagagacggggtttcaccatgttggccaggctggtctcaaactcctgacctcgtgatcagcctgcctcagtctcccaaagtgctgggattacaggcgtgaaccactgcgcctggactctttccttttattaaaataaacttgtttttgagcatttatgtgcctaacactgggctgcgcagggggaatcaaaagacacagtctcataggtcaggcagatgaaagaataggctatggtgctgctgtgagatgagggccacctggctggggttttcagaaggaatcgtagaaatggcattgaacctggggaatgcataggaggggtccaggtgaaggatagcagttgtggaggaagaggagaggtgtggtgagaggaaggggctctcagcaggcagaaccagaggctggaggcaggagtgtgcccactgcaagcagttccttgcagctgcatctgagagtgcaaagtatggaattaggaagatgtgaactagagatgttagcaagagtggatcgtgagagggctttgtggtgagggccatagggagccatagaatgatgtttaagcagggaagggatacacagtgatcagattgtcatgttagaaccacgcctcgttcacttgcatttgcctgttgccatatcagaactggaactggaagtcccctccagggctctgccttaacaagagctggatgcagatattggggacagggagtggtagggagagggtgtggtcaggacaaggttagcctatcattacaaacagcccccaactctcaggggctggaaaccacaaggtccatttcttgctggtgctcctcatccaccgtggggcagctggggccctgacatgctttccccacttccaggacccatatgcagaagaagcagcaccatctgggctttgtgcgttgcttagcagggacagggatttcctgtgtgtatcagagcagccctgtcatcctgctcatgagtcactaggcaaagcaggtcaacgtcaaaggttggtgggtggggacatagaatcctactaggtgcctgagaagagggacagctgggaacatctggtgacccgcaccagtgattaccaaaaccgatgatccccccagtccagcctcactcgctgtgacagtcccagatccaggaaggtctagacttgctggtgctcagctgggctggatggggaagacctgattctcacccagcagcctaggtattggagtagtgatgaacactgtttatgggagagctggtccgggaaaaatagattcttatggcggaacagctttattgccctccaggggggaaaatatgttcttagggtttagaatcaggtagaacatcagtgagagagctgccactgctcattagccacaaacatgtttctacctgggtacatttgaggcgaaacaacacgggttatctttaatcacttatatttgttcataaggcttcatttggtgagtttctgggtactgtctcactttatgttggtgtggggaaatacttaccatagtaattattgtcacccttcatttctacaaatggggagactgagacttagggaggtgaaaattacttagctgaagtcacttggtgagataatggtagatcttaggctgatattacttaattccatttgttgcaccagttttgagtttctgatgggttccagcactgggctgggctccagggacacagagatgggtaagatgtgcccctctccctcaacccctccatcccttcttcctcctgtctgctctgagcaggactatcccagcaacccacaggactatgaaccctgacatctgctttcttgggcgctctgggtgctcttgaagcttggagctgttctcagtgatccctgcaggtccaccaccaaggccttggactcagctgcgataaagctctgtgctgcccaggtcctgggacattcccctctttcattcttccaggtgccttggaatgagcgattcctaaaaggcttgctccatttgagatggctttttcccacttattttatggcttaaaggctgcctctgatttcagatttagggtctcagcacaaaacgtggttgaccatgtaggttggcccataaagtagtcattttgttatgctgagtcctgtcttccaagttccacactcagcacccagacagctactcaagatctcatgttgctgtcaaacctcaaacttaccttgtccatattcaaatatgtctttccctcactctccaaacctcttcctccagtatcacccatatcagtacctctactgcccctaccctggttgaaccaaactcaccgtcacctgaaccatggcaacatcctcccaactggcctctctgctcccaatttctccccatgtttgaaacacagataagatcacctcaatccatcttctctagctatcggggagaacattcacttccaatgttacttcctcaaagaggcttttctgattagctgttactgcactcagatcatcctaaatttagtggctcaaaacaacaacaattattttattatgtgtcctgatttctataggttagggatttgggaaggtcttggcctatcaattctaactcagagtctcttgagtggttgctgtcagatggctggagctgggggcctggagcaactggggctggctggcatttcctactctcttcttgtagcctctctgtgtggtctagcttgagctacctcacagcatggcggcatcagggagggttgttagattgcttagaggtgtttggggacttcaagaccacatattccagtaaggagggtgactgctgtcccaccttttatggcctggcctcagaaattagtgccatgcctgacgtcccatgttggtagaaaccatcacaaaatcccatctagcttcaaggggaggagacatagacacatctgtcaatggaaagagtgtcaaagaattgtagacatatttaaaaatcaccacagaggccatccctgatgctgcatgatggtactctgtttccttatggcaaataatgcaatttgcaattctgtattgattctttgactgtgtatgtgatgtttagctcaaaagctactcaagggcagggactatgtttggttcaccagtagactcccagtgcttggaatatactggaagatcaatgagtacatgaatgaacgaatgaatgaatgaaaaattaagcaaatgctgttgctgaaaaaatcacaaactaaagtaattcctaggttactaactctcttgcattccatttatcatgactctcctctaataacatctgttacagaaaagcagaagagcaaagccggaaaggacccgtggggtaaatcagagagtgactctatttaccaggctctccagcattgtggaaactgcaatgcctcaggctggttgtggcccatgctcctgaggtcaggggctagttaatgtggtagaaaatccagttaggctgtcagggggaagtttgaaaacaatgtttatatttaatttccagaggaggctgacggaacgcccaaatggaatggcgctgttcacccatctggctccctgagtgttatgatgtttttcacagtacgttaacggggagatgaattcgccgactctgtcttgcagagggcgtgtgcgtcatcccacgttgcctgggaaaacaagcattaacaagtgtgagcgcgggtctccgtggaaatggtacagaagggggcccacggcgggatcattagtgttactttgcccctggaggaagaaggccctgcgtcatttcccatccagagtgggaaagggagagagactgagagataaaaaggaaaataaacagcccttttttatttatttatttttttttgagacggagttttgctcttgttgcccaggctggagtgcagtggcgcgatctcggctcactgcaacctctgcctcccagattcaaacgattctcctgcctcagcctcctgagtagctgggattacaagtgcttgccaccatgcccggaacatttttatatttttggtagagacggggtttcaccatgttgatcaggctggtcttgaactcctgacctcaagtgatctgcccacctcagcctcccaaagtgctgtgattacaggcatgagccactgcgccgggccataaatagccttttatagcaataagttgtgctcagaaaaagccccgacgtggcatgaactctttgcagtgccagagtagaagttacaggcacggaggagagaggactccccaggccagcatcttccttgtcaccatcccacagggggttgcctgcctgaccagacgttgactatgttgtttgcccaaacagggaaaagttaagaagccaggaggtcaaatgtcgacccggaagttcacccatgcgcgctgctctctaatgttgaagttggtggagttggtttgatttagggctggtggcggcaatatgatctcagtgcagcactgtcctgtccgggggagttagaccctggccagactcccaagtgcaagtgccacttctgccaattgctagcagtgtgaccctggtgggctggtggggcattcaccccctcttcatttcagtgccctgaactttgaagtaagaaaaggccaccgggaggatgaagtgggattaaaagagttaatacgtgtcaaagtggttagaagggtgctagtacttaagtgagatgtcagtgcttgctgtgttcattactattacggtatatgtgaattacttgggcaggttgggagaggggtctaggtcatcaggaatgaggggcatcactaatcaaaagacacaaagtcttcctggccttacacgtggcttttggctttccagggctggaaaggagaggaacaaagcagacagatatgccctggactgccaggagaaggcatactggctggtgcaccgatgccctgtgagtatcctcctgcctggtgtcctctgtctcttcctgtgcctcccacctccatcctgtgctctccatacctgttgccaactcctctttctctagggcgagaattggatcagcaggaggagctgctcagtgttgggttagcatccaagtgcctcttggccagaaaaggaagttctctgcctggatggggtctgctcatggcccatctgttggtgttaggtagggagggacctgaatgaatttgtcttttacgagggctgggacttttttttttttttttttttttgctaggatatcataccttgggaaaggaatataaggagaaaaaattagaacgtaggccccaatggaggcgccaatgcagaaaaatagagtcccgtgagaatggaaactgcttggccaaagttctccttggtgtctctagctccctcactttttcctctcctagatccagttcccagcagctgagatgggagaaggagaaggaatacgtctgtgttgagcttctccttgcttggagcacactgaatctctggctttgggacttcagtggcccagagggacaagctgtacagagctggtgtaacttgccccagctcatcactgggaaatggtagcctcattccccagcacacagaagtggggtctgactgctacatactgggattaactctgctacctcagtttcctcctgtacagctccctgtgctgcctatgggtcatgggaggtaggagatgtgaatgagattctggaaaccgaagagttagaaagaaatgttcttcctcctcttcctttagcttccttgcctgccaggtatcagaaattctcagaagcagaaggagaactgagtgaggcctggtgtcagagtttatggatttttgagtttcaagcccatccgattttggctgttttgcttatattctttatatactgaaaacagattctcctaaggtgttccactctgtagcggcatgggtttggatgctgtgttgctgaggttaaggtgctgaggttgatcccaaacagcttgtttgattttttctttgcttcagggtttctcctctagggaaaccagtttacagatgcctgacgcaggtatctgggggccgggtgacagagcacagggtcccagagataagcacccctcctggttggtagcgaagaaactctttgtatgagaaggagcctcacattgctcgtgtgttccagaagcactctgtggtgaggataaggagacatggcggatatgccacatttggcaagacaccttggtgcccagtggcaccatacctgagggtaggtaaagaacggcttctatattatgtgcagagactcctcactgtgcgaatgcctatgtgactacattccttgcaaagtgacatagactagctatgcattaacatgaaaaattgatcatccgggttcttctcagttcttctggggtaagttctcagcccccaccaggctagtggctgagtggctcttcacaggatgatgctgaatcacataaatatgaccatgtgtctctatgaccactgcctcccccccagcccatctccaccaccatgaccgtcatcccacctcccactccctcacctcctttatctccctgacctctaccacctctcttatttcccccactttctccaccacctccaccacccttattgtcttcatcactgtggtcactgtcaccgtcaccatcacagtagacatgaactgagaactcccagtgtgctgggcactgtgctaagccttctgcattcttttttttttttttttttttttctgagatggagccttgctctgtcacccaggctggagtgcaatggcacgatttcggctcactgcaacctctgcctcccaggttcaaccaattctactgcctcagcctcctgagtagctaggattacaggcatgcaccaccatgtccggctaattttggcatttttagtagagatggggtttcaccatgttggtcagcctagtcttgaactcctgacctcgtgatctgcctgcctcggcctcccaaagtgctgggattacaggcgtgagccaccgcgcctggccgccttctgcattcttattgaacctttgcagccctgtgtggaagggtttattattattctcattgtactgataagcaagtgaaagctcaaggatgctgctaatttgcccaaagttacacagctagttagtgccagagggtctgaacccacataccactgactgtggagcaccaacccctgcaccttagccctgtgcacttctgcctctcatgacaatgtcatgtgatatcttggtacagttcagtcctttggtaacctcctcggtcattagaacgttgcctgggtcactgctgctctaagaagccgaatgcctgggtttacacgtgcctggtccttctttgacagcactggggacccaagttcagcatgaggctttgatggactcagagtggtcctagaacttccaggactaaaaactgctccccacatctaacctctttcatggctgctccctgagtgaaaaccagaccagtagtcaaagatgaggcaggagagtgcagtggccccactctctgtgattttcttaaaattctccccatctcttgttggcctgtgggggtggaaggtagtgtttttgaagagcatctcagtctagaaattgagcaatctgactgacaggctcaggaagccccggagctcacaggctgccagactgtctccaggagacccaaacaaaccgtcagttcaatgggaaaaaagccagccaaggcaaacaaagcacttggcgccgtggagtgtcgcggccactccgtgtcagactgtaaccaacagttgtagagtgagacgtggcctgctgttactgaaccgactcattcacttgttcatttgtctgttcattgatccatgaaatcttcgttgagccttgactttgtcccagggaaggggttaggtgctgggtgtgaaataacagccaagagtcattgagtactcctctgaacctgtgttaagctcttggcacagatgacctcattgacgcctgatgctatgatgtagggaatatcaccatccccgttattcagatggagaaattgaggctcatagaggttcagtagcctgctcagttctgggagaggaagccacatctttctgatggtaaagcccgatattctgcttctgtgcaaggaggccccacccgtggtccctctctcagctcaaggagctcaaaatccaaattgctggagcacaggtgagtgacactctcccagagataagacctaattgcagaaggggcacagcgagagggtgattgatttagaaaggcagggagaaatgtctgatagatggtgtttcagggagatcatcactggcaaaggccaagaccccacgtgggtggtggtagttgagggctctgacctgaattcctacccagagcccaaaggacacctgtgattcagcatcctgtaatgaaggaaaacgatgtttctcacctgttttttactcaaatggaaccaagtacagatctgagcacgatgcaaacaacagtgagttttgtaaatgaacaaagggagaaagtgctcccttagacaggcatgtggaggccttccctgcatctttgctgtgccatctgtgacttcctgcctcccaaggatgtagtctgaggctgcttcctggcggtgggtgtgcttatctgcttatcaagctaaatgacccttgtttcaaccacatatgcagacacttgccagagatgtctgccctccatttcccatcgaagttaggctaaatgtccaacaatggaaaatggcaaaataaattgaggtatattaacatgatggaacattgtgaagctattcaaataatattttcaaaggccattcattgatctaggaaaatgatctgacatacaatgtgttttttgtttgtttgttgttttttgtttgtttttgagacagagtctcgctctggggtgcagtggcatggtcttggctcactgcaacctctgcctcttgggttcaagcaattctcctgaatcagcctcctgagtagctggaattacaggcgcctgccaccacacctggctaatttttgtatttttagtagagacggcggtttcaccatgttggccaggctggtctcgaactcctgactctaccttggcctcccaaagtgctaggattccaggcatgagccactgtggcggcctgacacataatgttatattataaaaccagggtgggtggaatgctccatgtgccatggtccaaaaataaaaaataaaaaaaattaacatatattttgtgaatatctgctctatgccgggtgcttactaggcattggggatatttggattatgagccaagacagacattgcccgtgacctcaaggagtttcttgcagtctggtggagagacaaagactaaaatgattaaaccaatgaatgagtaacaagcagaatgccatggcagctggtaggaggcaggggctctgcgtccggttgggggtcagggaacacaggacacaggacgtggagagtgacattcaagccaagatcctctaggagctgactttcctaacacagcaacataaaattgtctccctgtttcacctcatctctatttcttttttctttctttctttctttcttttttttttgagatggagtgttgccctattgcccaggctggagtgcaatggcgtgatctcagctcactgcaaccttcgcctcctgggttccagcgattctcctgcctcagcctgccgagtagctggaattacaggtgtgcgccacctcgcctggctaattttttgtatctttagtagagatgggttttcactgtgttggccaggctggtctcgaactcctgacctcatgatctgccggcctcaggctttcaaagtgctgggattacaggcatgagccaccgcgcctggcctcatctctatttctttcccctgtcttattttgtttagaaaacgagttagtgttttacttagtatttgttttctgttccatgcaccagaagagtctgatatttttgggaagagagtgaagctgagagaaggaggggcagggggacacggtggagtaccaccgagaagtgtccgtcagctccacgctggccttgctctgtatgtgggttcctgggaacatcgcctcctcacgagcagttgtcacgagtacaggagctcctttcctgacctgaatgatgatgcattgagcaaattgcctctttggcttacacccaagggatgttgtttgtggggggcggggtcataccctggtgttcacagttcctcagggtggaggaggggagcttgcatgtctctgaaggcttcctgcatgaggcaccagggcagaaagtgcctgctgcctccttatctgcgggccacacaccgcaggatgcatcggctgcccttatttcctgggcgctgacagtcagttctggttaacttcatctgaacaccctgttatgtgccagaaactgtgtcagcagcactctggtgatgatcatagtgggtcaaagactttacactacctgatgaatgaagaaatggatgaatgaaaggagcttgggagtctctgaaaccagcagaggcagaaaggcagccctctcaccagtttcgagggcagggaactggaaaaggaccacagcttgattgggaacaactgagacttaagggctgctgcccacagaggtgcaagagccgaggcagcagtggccagaggactgtgcctggctgttctgtagggaaggcatggagagccaggttggggctggaactggacaggctggcagaatcatgaagcccagtgggtggctgcaggtctgagagtctaaggccgtctggtctgggcagctgagggcatagaggactctatctcagttatgcagtgcactgttgagcactggggcaaccaaatttatatcagagcctggggcacattggaaggaaagaactagataacgaattcaagacttgagcagatgaccacaccgaagtcaccgaggcagtgagcgcctgtggaatagcagccagacactggttgtagggcatcatgagcacaggctgtgtgtgagtgtgagtgcatgtcagtatgtctgggtgtgcatgtatgtgagtgagtgtgtgaatgtatgtgtgcgagtgtgtgtacatgtgtgcatgtgtgtgagcatgtatgtcagtgtgttggcgtgtcaaggtgtgcatgtatgtgagaatatgtatgtatgtgtgagagtgtgtagatgtgtacatgtaagtgagcatgtatgtgagtgtgagtgtgcatatgtatatgtgagtgtgcctaggtttgtgcatgcatgtaaacatatatgtgtcagtatgcacgtgtgtgagtgtgtgaatgtgttatgtgtgagcatgcatatgtgtgtgcatgtatgtgagcatgtttttgtgtattcattctcatagtgttataaagaaatacgcaagactgggtaatttataaaggaaagaggtttaattgactcacagttctgcatggctggggaagtctcaggaaacttacaatcatggcggaacgggaaaaggcacatctgacatggtggcaggcgagagagagcgagtatgtgaaagaggaactgtcagacacttataaaaccatcagatctcatgagaactcactatcatgagaacagcatgggggacaccacccccataatccagtcacctcccaccaggtctctccctcaatccctggggattatggagattacagttcaagatgatatttgggtgggaacacagaaccaaaccatattaatgtgtgtgtgtgtgtgtgtgtcaggacatgtgtgtatgtgagtgtgtgtgagtgtgcatatgtacatgtgggagtatgtgtaggtgtgtgcatgtatgtgagcatgcgtgtgtgagtgtgccagtgtgtcagggcatgtatgtatgtgagcatgtgtgagtgtgcatatgtatgtatgagagtgtgtgggtgtgtgagtgtgagtgtgagagtgtgtgaacgtgccaaagtgtgtgtatgaagtctgccttcagttatgcagggggatttctccataccagattcagggggcaactcctagaaccctttttggcaaaggcactgactctgctgagcccctgccatgtgaggttagatcccatggtgttatcccttcaagacacctgtctcaactctaatttatcctttgtgtgattaattgctgagtggctacctcccccttgagactgggagtgcctcagtaatgcctgctggggagcagtggtctcggggcacactcaccatgggctccccagggctcagcacaatgtccggcacataagaagtgccccatagatatttgctgatcaagatccacttgtaacaactagggtaaggatggccattccctttccctgtcctcctccccacccactttctattgccttttcctttctcttccctgtgtcgtcttgtctgcacatatttgcctccatggtagcccggtgagctaggttgctagatttagcaaataaaatacaggaaatttggttgaatttgaatttcagataaacaacaaataatttttatgtaaaatgtattttgtatatttagtataaatatataataagcatcaaaatattgggacagaaattatttgccatttatcttaaattaactgggcttcctacattttatctggcagtcttacatctgagctaaaacccagtctgatcccatggatgaggctgaatttgatggcaagaaagcccagttgcttcccaactctctgcttcagtgtagccaacctggttggtcacatgtgctgagcaatgggtggatgcctggcatcacacctgcatcaggggaagtgaaagacccaaattattggtctcaaagagtcaaggagttgagagagaccaagtaagattttctggagagctgggttacctgctggcaaagggaactaacagagattacagtcccagttttgggccattcttttacatatgtaatcttaaaatgaatacaaccccttgctcagcaatagctaccttctgtggagagcttcacaccctatcttgttaaatcttcacaagaacctgccacgtaggaggattcttctctgtttcttagagaggttagtgagtgccaagacaaggagtgttttccaagatcttctgcacagctgggaagtggcagaaccaggagtggcacccagacgtgcctgacaagcctggactttcccaaagcactgctctgtcacttcacttttcccgccaagcccaagatgaaaccacagagtgtggggaaggagcactgtgggaagagtcaggaagcccatgtattagtctcagtgaactcttttggagcctgaatgttacccatccatatgcccactcactcatccatccatctactcactcaaccatccatccatccatccatccatccatccatccatccatccacccatccacccatccgtctatctcttcacctatccattcaccatccatctaccacaaatttacccattcatccatgcatccatccctccatctatacatcccactatggtgctgagtttgccattcatctgtccatccatccatccatccatccatccatctcttcacccatccactcaccatccacctaccacccattcatccatccatccctccttcccttcctccatccattcgtacaccattccattccttcatccatccatctcactatggtgctggggatgccattcatttgtttgtccatccatccatccatccatccatccatccatccatccttccatccctccattcatccatctcactatggtgctggggatgccatttatctgtccgtccatccatccatccatccatccacccatccatccatccgtttattcacccacccaccatccacctaccacccatttacctattcattcatccatccacccatccccctctccttccctctttcctgccacccatccaactctggtgctgggaatgccattcatctgtctggccatccatccatccatccatccactcacccacccatcaaccatctacccgccacccatttacctattcatccatccacttatccatgcatcccactatggtgctggggatgccaaccacctgtccatttttccatccatccacccacccacgcatctacccatccttctctccctccatccttccatctcactatgttaggtgctggggatactgggaggcataacagccctcatgaagctcaacagctcacctggagggtttacacccactcaaagcttcccatgggctaggccacaagctcttctcagctcaatctcacaattggcagattaaccaagacccacagttaaccagaaactggagactctccctgtaatgaccttatgttgtttttattccatttagcctggaatggacaatgtgctggactacggcctggaccgagtgaccaatccgaatgaagtcaaggtaaaccaggtatgtctctgctgcatagtttgggtagggcctaggtcggattctggggctgggaaggtgtccacatgtctattcgtgtctgttagggcaacgatatctcctctttgagactatcaaagagaggaggaccgtgggctctgtggactcagggttaggggagaagtgggaccatggcaggatgctaggtgagaagaaattacgactgaagacagacagaggctgtagagtgcagggaagagctaatgggatctagatggctggttttcaaacttttctgagtcacttcccccttcgaaaatctgatgaaagttatgagctcattccactcaaagatgcacagacagacattctgtacacagtttcagccagttccttgatcctgaggagactgtagaccccagcctcgaaactcttgaatcagttttagatttaaccttaatccacatgacaggacctggaatctaacactttctttcacatcccagtggagtgggatctttgtaaagattctccaagcaggtttcattaaaaaaaaatacctttcctcaaataggccatctttcatgatggatagccaatgtcctatgagtatttatttatttatagaaatacagttcataagctgttgagcccatggccctattgacattttgggccagataattctttttttttcctatttatttatttatttatttatttaattcatttattatttgagacagggtctcactctgttgcccgggctgcagtgcagtggcatgctcatagctcactgcagccttgacctcttgggctcaggtgatcctcctgccttagccacccaagtagctaggaccacaggcacatgccaccgtgcttggctaatttttgaaattatctgtagagacagtgtctttctatgttgcccaggctggtcttgaactcctgggctcaagcagtcctcctgccttggcctcccaaagcactgagattacaggtgtgagccactgtgcctggctcagatagacaattctttggtgaagctgtcctgtgcattttagaatgttcagcagcatccccagctctgcccatgagatgtcagtacctccattcctctccctgcccacctaagccccagtcctaacaatcaaaaatgtctccagacattgcccattgtaccctgggaaggaagtcaacattactctggctgacaaccactgattccaatgaaccatcctagacccatttaaacagatcttaggtagtttcattgctttctgtcaaacattgtctttgggtagcaagggtgtcatctctagcctagggtgcatctatagggctctgcagagccttaaggcatgagtgggggcctgtaggggtgtgcaggggaaggaggagggtggaagtgggaggggaaagaaaaaggagccagaaatgttagcaaggcagctctgggacagtgtttgcttttgctccctggagagggtcaccgggggaaccattaggtctcttgtccacaagctggagagacccttcctttgatacacacagggcacagtcagccttaactcagctgttcccagggcagcctttcccgtgttccccttgccagagaacagatcactgctgaggccttgtaggcttggttgccatggaaacagaatcctcgagtaaaagattgaacctgggtggaagggttgcttttttttatggctaactagcagctctggaaacctctttcctggggaggagagagagggtggaggcagaaagcacatcactcattctgagatgggggggtgggaacaaagggtcacccatccgtgacccaagccaggatactgctcagctgtgtgtgtgtgtgtgtgtgtgtgtgtgtgtgtgtgtgtgtgtgtgttgggggtggttaggcaggaccttaacttcatccatttgagagggaagctaaggagctgagctgctccatcctgggggtgacttctgaggagggtgaccagattactgtctttactgaggaggcatctttgtgctccttggccttcagagcccacttcctgcggatgtggatgctggcaacaccctcagcccagaacccagtgggcaggctgggtgtacgacagagggtgcctttgccatggtggggtgtgatacgggctgtgtctccgctgtttaccgttatcttctctgtctctctctctctctcttcccagctatctatctatctcctgtctgtgcactctggctgctgtggaataaagtattaagaagaataaagaactgcaattctcatgcatgcagagccccttccagccctcccctcaggcagccccagcatgctgtggtttatctgtctgcaacattttccactgtctgcgagtcccctgtgttcccgggttaatctgccctgagagaagagggttgccaagagcatgaagcatctccatgaagacctgggagtgcagaggctttggatttttgtctcacttcagagaactcatggtgcctgagctggtttgaagagaggtcattttgagaaggaatcgatccttctttctttttttcttttctattctttttttttgagacggagtcctgctctgtcacccaggcaggagtgcagtggcgtgatctcggctcactgcaacctccgccttccgggttgaagtaactccttgcctcagcctccagagtagccgcgattacaggtgtgttccaccacgcccagctaattttttcatatttttagtacagacggagtttctccatgttggccaggctggtcttgaactcctgacctcaggtgatccgcccatcttggcctcccaaagtgctgggattacaggcatgaaccactgcgcctggctatcaatccttctttttaaacttttattttaggttcaggggttacatttcaggtaaactgcatgtcaccggagtttggtatatagattatcttgtcactcaggaaataagcatagtactcataggtagtttttctatcctctccctcctcccaccctccaccctcaagtaggcctgggtgtctgttgttcccttctttgtgtccttgtgtactcaatgttcagctcccacttataagtgagcccatgtggtatttggttttctgttcctgcgttagttcgcttaagacaatgatctctagctccatccatgttgctacaaagaacatgatctcatttttttatggctgcatagtattccatggtatatatgtaccacattttcttcatccagtctaccaatgatgggcatttaggttgatcccatgtctttgctattgtgaatagtgctgcagtgaacataggcatgcatgtgtctttatgacggaatgatttatatccctttgggtatatacctagtaatgcgattgctgggtcaatggtaattctattttaagttctttgagaaatcaccacactgctttctacaatggctgaactaatttcattcccaccagaagcatataagcttcccttttctccttgccagcatctgttattttttgactttttgataatagccattctgactagtgtgagatgttatctcattgtggttttgatttgcatttcgagaatgagtaaattcttgagaagatgtatctgttttccccaaatagaggcaagtaaccgtcaaccataaggaggaaagtcattaggttggcaggtgtctcgggccctgggtggcccactcccactggctaatggcagctgggagggactggccaggggccgggaccacactctagaagtgagtcctcttttagctccaataccttgaggcatacggaacccccaactcctgcaccccaggaggtgatgggggcaggggccgctcatggcaggatcactgccatcatttagggatgagggcagtgtcgggtgctgaagagacccttgacattggcctgagccccagctctgccacttccggtccatgtgatcttgggcaagctctttcttgagccacagtctcagtttcctcatctctaacaggggaagcatgctagttccttcatcagaggattaagcaggatcacttatgtgtagtgtctagaatgctaatcaacacgtagagacactccacacacagctggtattattctaaatgttgtcatgctatgagagagaatttatgggacttgtagacctcagactccatgttagggtgctgtacctagccaatttcctcttctgccttttcaccttctcatacttctcccctggttagaggtggaaggaggggttacatgccaatttcaacctctctgcctactccaataagcagctgctcagaacctcagtctacactggcgagtatacagatcttttggtaaaaggcagaaatatggcctcccagtataaaatactgtgctctgcagaggtgctcagcctggagccctcacacaccatatgctcccgccaataggggacaaacttctttcttcttgtggcttctgtgtgaccatgcctagctgagggaagggaaggggctgatgtttgctgacagctccctgcgtgccaggcatggacctgagtgcgccaccctttgtaacggctcagctaagactcactactgcgttagaaggtagatggccacgttgacctccgtttcacggttgagaaagcaggccgagagagagggtggctcccccaaggacacacagctgagaagtggtgaagccaggatctgaacctcagctgatggccgccagagcccactccacatcctgcctgatgttttctaatgtccttattgtggcttttagaagtttttctgcatttcctgaagtccattaacagagacaatgtcagtttcctttttcacatgaagaaaacaaaatagagagacatagccgtttgcccaaggtgacccagccaggattcagttacgtgtttccagttctgtagctcatgggcctccctgatccaaccgctgctcccctctccaccccacaaggcctacgtcctgcacccagggccggcttcatgggcagggggcttgtacagccgcccaagaccccaccctcagaaggacccttgtttgatttaatgttctgttaccatctcagaattccttacactttttttctgaacagtgaactgcatttttattttgcactgagccttgcaaattgtaagcaattctacctctacttgatgaggtcgtacctggctggacggctatttacttcacatgatcgcaatcttaaatccaagactccttagacagctgcacccccttaatttttttaaatctatctatctatctatctatctatctatctatctatctatctatctacctacctacctacatacctatctatctattttgagacagtcttgctctgtcacccaggcatgagtgcagtggcacaatctcggaccactgcaacctccgcctcctgggttcaaaagatttttatgccttagcctactgagtagctgggattacagatgtgtgccaccatgcacagctaatttttatatttttagtagagacaaggttgtgtctttttggccgggctgatctcaaaatcctgtcctcgagtgatccgcctgccttggactctcaaagtgctaggattacagatgtgagccaccacgcctggcctttatttattcgttttgagaccaggttataagactagctaatttttgtatttttagtagagacggggtttcaccatgttgcccaggctgatcttgaactcctgggctcaagcgatccacctgccttggcctcccagggtgctgggattacaggtatgaaccactgcacccggctccatctcttttcttgcctgcttaaccacttgtgtttctggatctccgggtttctgactttagaccccctctctgctctcaatgccagtgctgcccgattcctcacggttctccccatctcgcctttggctccgtggcttgcttggccccccacctgagtttctctgcagatacctgcctggctaccccatcccaaggtccttgcttatttctcccctgcactcctgccggtggcctgaccccttctgccctgtgccaattgtctgcaccctccatccggggtttgccagtcagccggcccagagctatgtaaacaacaagtctagatgtgtccctatttgggcaactctgcaagggaaaaataagaagttgttagaatgctaagaatgcagagcatccggagattccttaagcagagtcttcctcctgtagcaaagtgtgtcgctgagatgaggcataaagaagtggcttcactccaggagggccggcagctgagaaaggagggaagttgtgtgtgaatgccaggctggaaaaaaactcttatttcttattttatcatgaggtggttttctttgaattgcttagaattgtgcgtactttttttttgtaacaacttcgttttaacataatgtttcttattgcctttggctaagatataataatattgatagtaggtttgaaagacttagcaaataaaaatacaggattcccagttatgtttgaatttcagataagcaatgaatatctttttttgcataataggtcccaaatattgcctgtgaatcctgcattttatctgatgagggcttaaattgtgccgctcacgtgctcagtggtggtgtagtagccctaatgaataggcactgtgtgtgggtctctgctatgtgccagggaccttatgtctattatcgcatttagtccctctttttttctattctccttttacgaatgagaaattagaggctctgagatgctgagcaactcatccaaggtcatagccaggaagtggtaggactagaattttaacctttgtccgatccccaaagcccatatgcttctatttctttttttccttccttccttttttctctctttccttccctccttcattctgtctctccctccctcctctctcttttcttttttcttttcctttcctttcctttccctttcattctttgtttctttctctttctctttctttctttctctttctttcctctctctctccttccttccttccttctttccttccttctcactgtctctctctctctctctctttcttttttgagacaaggtcttgttctgtcacccaggctccagtgcagtggtgccattgtagctcactgccacctcaaactcctgggctcaagcaatcctctgtcctcagcctccagtagttgctgggaccacaggcatgtaccaccatccatactctttcctgaatctcttctccaccactccctccaaatcaatttgtctcttcaccttttaaaaagttcaggactcttttctctcactgtcccctccctgtacacactcctagaagagcagagatccctgtatgttaatctagaggaagcagatcccatggatggctgctttttccaggttcataatttattgtacaaattgaattatcacatgacaagtcgacatgagcttctccaggcatgagaactaaacggctgaggcacagacagtttagaatccattatattgctttcacagatggagtttttttagatcttgacttgaagtgaaagatcatcaaagcaatgcctccatatgtggccagtactcaactcactgtacttgtgagcgtctaagagttgaaatgcattttaacgcctggaattgggcatcagtttctggacctgccatgatttcaatctagccaaagccacacattccacagccactgtccttcaatgtacgcaacctggacagctatttttaaagctagaaatacaagctaaattcatgtggacaatccaaggtagaggtgggaaagtctcaccttcaaccaaatcctattaatggagagcaagctgcagttccattcccagaaggtaactggtaattctgggaatcagaaaacaaaatagcaaactacagcacagaggcagagccctagggagataataaaatcaaatgaagtgaacaggagtatacaaattgtaaacccccgaagactgagataatggccctagaagcaagtatagtaagccaaagggagaccccctagaggcagaatggaaatgagcatggcagaaagtcctgcaaatacagctccctgcagggcccagagaacaccaggcagccaggatgcatctgtgtgcgtccactcaggagccctgtgcccccatgttctggccgcagaacagtggccgacaggcagaaagcttgatgctggggtctggacaccttggaggtgcttatgacactggcggctgagtgtgagcccagcacgattctgcaccatcatgagtgttaaggacagagtgtttctggtacttgtattttgtcttgcgttacggctctagttcacttttggtttacattttatttatttatttatttatttatttatttatttatttatttatttattctgagatggagtctcgctctgtggccgaggctggagtgcagtagcatgatctcggctcactgcagcctccacttcctgggttcaagcaattctcctgggtcagtcccgcctccaccccaccccccaccaagtaactgggattacaggtgttcatcaccatgcccggctaatttttgtattttcagtagagatgggggtctcaccatgttggccaggctgaccttagatgatcagcctgcctcagcttcccaaagagctggggttacaggcgtgagccaccgaacccggccttgtttatgttttaaattaagtgactggacagagtcattccatcctgtagcactctcagcttcagggcaaggaaggaatgggaagagagcaggctaggaggaaaaagtgaacaggatcagcgattttgtgtttctcaacaatcgctcttcagctttgcaaagggaagagctgaatttgaatcctggcccatccaattactgaccaggaggtgttgagaagtttacccacaacctctcagaagctttgtttcctcagctaaaaattagtataataaaatctccttaccttaagctttgtaaagactcaaagaagtataaattgctttgcagtagttgctaggcagttatcattatgtaaaagtacagctccccctttgagcagagggcataaaccagtagatgctattctgaataacccactccagcaaggctccaacagaaggaagtaattataaagtattagatttgaatgtaagtccactctggccccagggtccttttctacctgaaatgtgcatcttctaaaacagtgccttaggttggaagagaatgggatcaaataagtatgactgccaatgcatttggatcatttggggagtgctttcaattttttagtggaaaaaaatgctattaagcttagaaaatgtccccattcttctaggcccccaagcatgctgaagtcatcatttattacacatttactgagcatctactctgcatcggacattgtgctagggaagatagacctggtcccctgccattaatggtgccttcatgttgattcatacattaaacaaagagtcacacaaataaggataaaattcaaatggcgatcagtgctatgaaggaggaagtcagggtgtataagagcctaaaacttagagaactacgtgagccttacctttctgagataactcttcctaatcccctatgcaggaaaaagatttcttgtgaaaagcaatgatagaagagcaatccggggaagcaaaatgaaacccagcctgagttagaaaggagagaccagtacatgacattctagactggactctcctttactccttttcaatgggctcatgggccagtgtttattttgctgactgcctcaaaggaagtagtgtcctcctcagacttaaccactcttttccaagtgaagacttgggtgggttaagcagcatggatattaacaaggcaggaattaagagggtccgcgtgaggccgggtgcggtggctcacgcctgtaatcccagcactttcggaggccaaggcgggcggatcacgaggtcaagagattgaagtgatcctggccaacatggtaaaaccccgtctctactaaaaatacaaaaattagctgggcgtggtggtgtgtgcctgtagtcccagctacttgggagactgaagcaggagaatcacttgaaccctggaggaggaggttgcagtaaactgagatcacaccatgcactgcagcctggcaacagagagagactctgtctcaacaacaacagcaataacaacaacaacagcaacaaaaagaggctcctcttgaagtataagagtcagtaccagccagcccctggacacaaccaaacctagaagaactgaggctgggatcaccaccttgcccagtctccaggagttacatggagcagaaaagtggtgcagaggaagcacggcccactgcaattgcagatctatgtattttagccagagatagatctgaatggtttccaggagcttctaagagcctgaacatgaagcccctcttggaactgtcctttctttctctgccttaactcaaaaagttgagaggggacaccctgaagcttatccccagtatgaccctgctccaacagcttcagcaaggggatggggcctgattccacagggcagctcaactcggggactcagcttgcagtgcatgctggcctcaagcctttccattatgtgctttatttttggtaacattggtttagttttcaacttatattattggtcaaattgttatgactacttggggaatgcatctcaccattgcttcagagctctcccctgtaacaaaagaaaccaacacccaagctctgtgctagtttttctatctcttctctctttctctctctcttttttcttttttgagacaaggtcttgctctgttacccaggctagaatgcagtggcatgatcatagcttactgcagtctcaatctcctgggatcaggcaaccctctcacctcagcctcccaagtagctgggactacaggtgcacgctaccatgcctggctaatttttttgtacttttagtaaagacggggttttgtcatgttgctcgggctagcctcaaactcctgggctcaagcgatcctccctcctcggcctcccaaagtgctgggattacaggcttgagccaccgcacctggccttccccatttttctcttaatccatatctcagacaggaatctgtatctctcactctacagatcattctgtaggcactatgctaaactgacaccagtttcaaatttagtccttaattgatcttggcctttaggtgagcaaagttacagtggtaaattacgctccttcgcttacaaaatctcttgcttggtatttattccccaggggttacatagaatagagtggaggcagtagacatggagaaatcctatcttttaagaaagaaaaaaatgggcatttttctcatggggaaggatttttatttttcaaatgggtgtttgaactgtaatgatttcatgacatctgcctaacggttttgtttctttgtcttacagaaacaaacagtcgttgctgtcaaaaaagaggtaattagtcttacacttccagtgaagaatggttttaaatcttctaacaggttatatgtactttgttttaccctctgcgcttggtaatgaaatgaaaaccacgtgcaatgttcaaacaattatttccaaattcacggacagcacagagtgacgaagcatcttctgtaagctctggctggggctggggctgaggctggcactcagggtctgaaaaacccctcgaaggcacagagctgaggggtggccagagaggactgtggaaccaatgctgcaggctgcagagactctacatccccaacgtggcccctgcacctatcattacagggccagaatctacccaaggtggcaactgcctattttggcaaatcttatgtctggggcccaagacagagtcctgggaaccatggggcattgagctggggtgtacggttagctatctgaacgtggaggaaggtggttgaggaggggataacttgctttggccaatgctgcagaatcaggaagtttaaggatgtcacctgtggtggggaccactctctgcttctgtctgccagagacatgtgagggaaaagccaagcgtttgtccccgtgtctcagttgaatgctccttagaacttttttttttttctgctgatgctttttcccagactaatacataatggctgaaggaggccactgatttgaagtctgtggtcatctgtccactgtgggcctgacccactggtactgagggggctggctctgggcatggaacgggatgtggctctgggtaaatggcttctgggtttggaggctgtgtgtagtgacactgaagggtgggagggggttgaataccttctaacaactgtgtctcttccagatcatgtattaccaacaggccttgatgaggtccacagtgaagtcttctgtgtccctgggagggtatgtccctgatttgttgatcttgctaaagtctgatgaacaggtagacaagaggagaacttctgcaaactcgacaagtcctgggctgacagactgaagattcagcagaactgtgagggacaaaaccagtctcttgggggcttagttcctagttcatccctcagaataaacctccgggtctcatcttgggttatgcaaaatcgagcgtaggtgaggttctagaaaagactgttatgtttcttggaatccactaatgtgtggatggggaagttagaaagagttggaagtccgtggactgtagaccctgtgaggatccaagacagcctgggttcctatcgttactggttccaattcattaggagtgtgtgagtcatgtttactggttccatgtgctactaaatgtccattgttcatctttgatttaaaatcccattaagataaattggacatttatgtttgatttattgaactttctggctaccttgacccagccccccataggacatcatctaggagacaagaaagagctgagtgctgcctcccacgtgcaagcagttattcttttaaaatgcggaatttatcttaggactgcatttctaactctgggattttcctgcacacatgaaaataaacttggcttattcctgggaggcacgatgtgactaatcatgtattctgactgtgtaagactcaagtcatggtactaatcgggactgaagatgctgttttgtttagtgccttccttcaatatgtttaagggttgggctcttgtaaaaatgttttacatcttcctatgtccccagtttgcaaaaatgccatctgcctgagaaaatatgccctgaccccacacacatttcagtgactctgctgctgctaagccctgatcccagctgaggagggcacctgtgtactcaggggcattcactttgggttataataatcatcattgttcagtgataaactcaaaaccatttacttccgtgttccataaacccagtttcatgaaaccaaacagaaagaaaatggaaggagacccaaggatagttcttagacccagtttccaatttttatttgtctcaggacctcattaccgtaattttgacatcattagtgttttgacctgtgaaccagtttttttttttgttgttgttgttgttttttacctccagcttctccactggtaaatgtctgggcccgtcgaggtgcctcatgcctgtaatcccagtactttgggaggctggggtgggcagatcacctgaggtcaggatttcagggctgaggtcggggcggatcacctgaggtcaggagttcaagaccagcctggtcaaaatggagccccgtctctactaaaaatacaaaaattagccaggaatggtggtgtgcccctgtagtctcagctacttgggaggctgaggcacaagaattgcttgaacccaggaggaggtggcttcagtgagctgagatagcgccactgcactccagcctgggagacagagcaagactttgtctcaaaaagaaaaaaataaaaaaggtctgattgtcgactaagagagtctcgggagagaataagccagggggcttgagttctgaatagaattgcaaacccagtgcttgtctctaaggtaccagtggtttatctctaaggcatggatcctgttctgtccaaatcttatggctgagggaagacttcagggcaggtgcatttcacattcactgtggacacaattccccacctacggggaggaggcacagcaggttttcaatacccagacagcaggaaatgcattgactcagaaggtctgactcaactcaagggaattagctttttttagaaaagttttttaaattgacacataattgtacatgtttagggggtacatagtgatgtttcaatacatacaatgtgtattgataggatcagggtaattagcatatccatcatctcaaacatttatcatttgtttgtgttgggaacattcaatatcttcttttctggctatttgaaagtatataaagtaaaacagaggttactacagactgggaagggaagggggaaggggagatagggaagtatttgttaaaggataaaaaattaggccgggagcggtggctcacgcctataatcccagcactttgggaagtttcaggcaggaggattgcttgagtctaggagttgaagaccagcctgggcaacatagtgagaccacatctctacaaagaataaaaaaaattagccaggtggtggcacatgcccgtggtcccatctcatcatgacactgacgtgggaggacggcttgagctggggaggtcaaggctgcagtgagccatgattgcatcactgcactccagccttagtgacagagcaagacaatgtctcaaaaaaaaaaaaaaagttacgaaattacagctagatagtgttctgtagcactgaaggatgactgtagttaataataatacagtatgtatttccataatagctagaagagaaggaattagctcttcctccaaatagtgtgtttggaccaattaagccccaggtttaaataatgggcctaagtttccaaacccaggcattatcctgagaaagggtagaacccaacatggcaagagtcttggagtctgtggcaactttgggcttctaagatgggtgcagagacacaagtttgaacactccaagttggtttgaatctaaaaacctattgataaaatataaacaggccatattttaatgaaatagatacagaaaggccgggcatggtggctcacacctgtaatcccagcacttcgggagactgaggtggatcgcttgaccccaggagtttgagaccagcctgggcaacttggcaaaaccctatctctaccaaaaatacaaaaaaaaaaaaaaattagcctggcctggtggtgcgcgtctgtgatcccagctactcaggaggctgaggtgggaggattgcttgagcctgggaggcggaggctgcagtgagccaagattgtgccactgcactccagcttggctgtctcaaaaaaaaaaaaaaaagaaaaaaaagaaaaagaaataggtatagaggaatgacagagggactggatggaagacaatgtttcatttcacaagtagaattgggactgattttgtcaaatacctgccaatcccaagggttatttgatttgaggaaatttctaggaaaacagtaataagtatgtcaccaaatcgatacaggaaaagaggacagcctggtcagttgacctgtgtattgatgtcatatcttgggtgtcgagcttctaggaaatcattttctgtttccttttcaggattgtgaaatacagtgagcagttctcatccaacgatgccatcatgtcaggctgcctccccagcaacccctggatcaccgatgacacccagttctgggacttaaatgccaaattgtatgtattttatatattggtgttttttaaaaaaccgtttttgagttacaattcacatgccataaaattcaccccttcaaagcatacagttcaatggtttttattatattcatagagctacaatcaattttaaaacatgttcattacacaaaaaagaaaccctggacgccctccagccttaggcaactatgaatctactttctgtgtttacggatttgtctgtctggacatttcctatcaatggcatcacttggaatctgaggaatgacagagggactggctggcagacaatgtttcatttcacaagtagaagaggaactgattttgtcaaatacttgccaatcccaagggctactcgattcgagcaagtttctaagaagacagtaataagtatgtcactaaatcgatacaggaaaagaggacaggctggtcagttgacctgtgtattgatttcatctcttgggtattgcgcttctaggaaatctaggaaagactatggggtcttttgcgacgagcttttttcacttagcatcatgttttcaaggtttacgaatcttgtagcatggatcagaacttcattcccatttatggttgaatcatcttcatggtatggatgcactagagtttgtttatccattcatctgctgatggacatttgggtggtttctgccttttagctattatgaagaatgcggctatgaacattcgtgggcaggtttttgtgtgggcatattttcatttctctcgggtgtatatccaggagtggaattgctgagtcaaatggtgactctatgtttaacaacagattggttttgaaaattaaaaaatcatatgtatggctttgcatgtttgatatctaattagcgtaaacttaagttctgggcgggcagggccctaaacctgccctttcccttaccctttggcttttttttgtcagttttgaatagtcattgctcactggacctgcacgcttgtgttatttggaagagggggcagaggcagaaacacaggagagttccggcacacagagggaggaagaagagaagggtgtaatggtcaaattagagggagagagagaggaggacaggggagaagggacaggcctgagtgtgtgagggaggtggggtgatgggaaaggaaggagtgccaggtataggtcacagcttgggtcaacactgccgaggccatgaggaacacacaggtgacactgacccagctgggtaagcaggcctggcctgggagggccctgattctcatcttaagcaacactggtacctattccacgtggcccgctctgggcagccaacaggttaaggaggccactcctctggagtcaggggtcccctgtctactaaggtcaactgcagagccaaagactctagaactaccttctggggaggcttcccttatcctctttgggctctggctgttggggtgcttctctgcagcccatgtctgcctcccagcgtactgaatgagagaggcgacctgtgtctgcctgtggacaagcatgtgcggacgctggctctccctggaggagaaggcagggaatctggccaggaagagggttgtcctaggagggcttggggaggagagatggatggccgctgaattttaaataaaatggggagcatggtattgaagacaggtagagattgctggcaagaagaaaaatgtgtgttctgtgtaagaaccgttgatcagagggcactgggtgggtgacaactggaactccccattaaagtgggaagccctgttcttttttgtggatcctatatgtttattgaaccaaatatatatatacacatatatgtatttgtaagtatatgtatatatatatttttattggtgcacctatcaactgtgccgcgtacactgaaccccgtttttagtcttatatccctcactcccttttcacccctttcccctgagtccccgaagtgcatcgtgtcattcataagcctttgcatcctcatagcttagctcacatgaaagcgggaagtcttgttcttaatggtttagattttagaacagtattacaattactggggaagcttaacaaaaacatcaacgttcaggccttatcctcccaaacctcttatttggttggcctgggttgctgtctcaccactatcagcgttttttgaaagctctgctgattttcacaaacagccaggattcttaggctggtttacagcgttgattcccagtgtgggccctggaccagcggcatccgcagcaccagggaacctgtcagacatgcgtattcttgggccccacccactcctactgaatcagaaactctgaggttgggacccagcaatctgtttcaatgcatcttccaggtgattctgatgcatgtggaagtttgcaaaccactgtcgtcatcacaactcagcttcttactaattatgtgagacttggcaagtatttaatctctttgagcctcagttttcttgacaatgagatgggatagtaatactcaattcatagtgttcttttaaggattcgatggtatgtgtgtaacgcacagtacctcacataggacaatgctttgtgaatggcagttgttaatgttatcagttttcttattgtttgtacacttgttcttatggaaagtgtaaaacttgcttggcatgctttatcttggatcccatagacatgaattgtgcctggttctggtcctagctgctacatcagtgggaaaaatggtgtgagggacttgaaaccttagtttcaaaggtctgtgttaggtttaggagaattccataagggataggagagaacactgagtctttttctgattctctggaatgttagatctctgctagctgggctcgaatatcctacctgggatcagggaaatctttccaaacaaggaggtgcagtgggacctgcatcttagaggaagccctgaaagggagtgcagagatggcaaatgggtctactccgaggcacatggcctgaggcaggtacaggaggagccaccggctcccaccagaagccagggtgtgccatggtaggggggcagctgtcgtgggtgataggcacccagcaggtggcagtgattgtagcacccatcaccaatgctgctccagaattctctcctagtccaggtggcagcctgaccctctgctggccaggctccaggctgttaccatgccttggaggaggcatttgaattcgtttgtccttaaggttaagtgagcaggacctgagtgtgggctccccacggtgggcatcctcctcacctctgggatggtcatgtctttgatgtgagccccgggggacttgtctgtggctgcatcttcctagcaagtgattacttggcttgtgtgttatgcagggattgggaggaggaggattgaattgagccctgggccatgagactaaaggccctcaccccaacccaggccaccacctgtcacaaccgctacctctctggtgcatttacaaatcatccttgcagggtggaaatcccaaccaagatgcgagtggaacgatgggccttcaacttcagcgaattgatccgagaccccaaaggtcgacagagcttccagtacttcctcaagaaagaattcagtggtgggtctttgtttacaaaaaaaaattaaaataacttacttttagaaagagtcctttaatgtctagcctagggtttggggaatttctcagcagatgttttcagagctttgcttatgcccttaaacagttgcttcctttcacagctttaagaatgggacctgagcccaagactcgttctttccatagactcaaagaggccccaccgtctgggggaaaattgcacctgctcacagaatctacatcaggatccctcacatttctgagggctccatccatcctggatgcccccactgtcacccgaggagcccccgctccttctagtcagcctctaaatataatgaacctggaggaagggaagggagacaggcaggctttccctttctttctctttttgtctcccagcctgattttcttttttctttgtttctttcttttttttttttctggagacagagtcttgctgtgtcgcccagcctggagtgcagtgggatgatctcagctcactgcaacctccgcctccctagttcaagcgattcccctgcctcagcctcccaagtagctggcgttacaggtgcctgtcaccacacctggctattgttttgtattttgagtagagatggggtttcaccatattggccacgctggtctgaaactcctgacctcaggtgatctgccctccccagcctcccaaagtgctaggattacaggcgtgagccactgcgcctggcttcctgattctctttagctcagtggttctacacattcagtctgcctggggatattttaaaacatgttttcctggatctcatccctaaagttgcttttaaattggtgggggttggaatccttgaagttttggaaactccccagatgattccaatgtgtggtgattgacagccatcaccttagctcctggcctgatttcttcagggccttaggagggtgtggattttagtgaaatgggcagggccacattttgtcccatctctgaatgtcacctcatgaggggaactgtgacttttttttttttttgatatggagtctcgctctgttgcccaggctgaagtgcagtggcatgatctcagctcactgcaaccattgcctccgaggttcaagtgattctcctgcctcagcctcccaagtagctgggactataggcacgtgccaccacacctggctaatttttgtatttttagtagagacagggtttcgccatgttggccaggctggtctcgaactcttaacctctagtgatccacctgcctcggcctcccaaagtgttgggattacaggcgtgagccactgcaccaggactgtggctttttaaatatactgcacttcccggagaagcatccacaaaaaaacacgaggccagatcagaaccaggctgtgcattcaccaccttcattgaaatatttacctttacgggattcttttacttccttgctcagtacccagccctgggggcatcactcctgagccttgacactcagctgcttactacccaagatccacttgtctgtggcactgctccagaaacgaatcctactggacatgcctttagcctggctgactgccggatgcaaaacattacatgataatatggattgttgataatcatctccctaatcaagtctaattgctgctctagaacaaaacccagaaaagatggatggactggcgaataagtggttatagtgccatctagtggcaaagtgacaacatacaccctgaatttattatctcccccccactaattccttagtgagaatccagcgaaaagatttccctgcattatttaaaccgtattattagcaatctcctcatgagattcctgaggctttaggtatgaacagggcagataaatcatcaatttgctcatttactttttaaaaagatttttaaattgaaatattatttgcatatgatgaaattaactttttaaaagtgtacaattcaggggttttagtgtattcactaaattgtgcaaccatcatcactaattctagaacatttttgccacattaaaaagaaactctttacccattagaatcatcttctattcctgcttctcctgcaccccagccctaggcaaccacaaatctactttctacccctacggattcacctcttcaagacatttcatgtaaacgaaatcatgcaatatgtgaccttttgtcttttttcacttagcataatgttttcaaggcttgtctgtgtttcagcatataacagcgcttctgttcctttttttttttttttttttttttttgacaaattctcactctgtcgcccaggctggagcgcagtggcgtgatctcatctcactgcaacttctgcctcccgggttcaagtgattctcctgcctcagcctcccaagtagctgggattacaggcgcccgccaccatgcccagctaatttttgtatttttagtagagacggggtttcatcatgttggccaggctggtctcaaactcctgacctcaggtgatccacccgcctcggcctcccaaagtgctgggattacaggcgtgagccactgcgcctggccacgtggttcctttttaatgactgcataatatttccttcattcctttttaatgaccccataatatttccttgtttgtatgtaccacattttgcttatccatttgtaagttaatgaacatttgggttgctttgactttttagctgttatgaataatgctgctatgaactttggtgtacatatttttgtgtgctcatttaatatttttggtgggaaaacgtatgtaacataaattttaccattttaaccatttgcttttgagacggagtcttgctctgtcgcccaggctggagtgcaatggtaccatctcggctcactgcaaccactgcctccctggttcaagcaattctcctgcctcagcctcctgagtagctgggattagaggcgcccgccaccacggccggctaatttttgtatttttagtagagacagggtttcaccatgtttgtcaggctggtctcgaactcctgaccttgtgatccgcccccctcagcctcccaaagtgctgggattacaggcgtgagccacccatgcccagccgaaatcttcttcctttttaaggccaaatgatattcccttgtagtcttcaccatattttgttcatccattcttttatcgatggacatctgagtgctttccacttactggctatcacgaataattgcttatttaattttactaagcaatcaactgtcttttgctatgggcaagatggtttacatggcacttttgtcagatcagttacattttagttgagagcatcactggtctgtgatctcagtccaaagaacgccctaaagttcatgctgaaaaggaaggacctctatagagctatgggacaaatgccaactagtttaaaattgtgcagccttttctaatatgaagcacccaggagcttttaaaaaaatgcagttgacccttgaccaacactggtttgaactgcacgagaccacttataggtggatttttttttcagtaaatatatttaaaaacttggggggatttgcaacaatctgaaaaaacttgcagatgaactgcatagcctagaaatagaaaaaagttatgaaaaggtatcatgaatccataaaatatatatgtagatacatatccacttatgtgtccattgactgtttatgttattagtaaggcctctggtaaacagtaggctatttgtagttaagtttttggattttctactgcataatggtctgcgccctaaccccttaattgttcaaggtcaactgtactgagaaaagagaggagaggattttgttgttcatttccccacactgtgacacactccacgatttacacacacacacacacacagacacacacacacttgctctctcttgtgatcgtctttattttcccaggcaaaaatcaccacctgggaccactgtatgaacatatgcgtggtacctctggacgctgcaggttagagaacctcgagttggagggagatgaaggatttgggggaacctggcttttccttctgggccaatcccctctggctcaggtgatgctcagttcagtcctgctcctggccagaccttccctgagggtcagtccatcagcactgcttcttgaacagcctctctgtaagaaccgttggcctggaatatgtctggtgagggactgcaaatgatgggttctctaagcacagccaaacaaaggaggaagaactcacgctcagtcattcaacgggagcaaaggaaggaggtcttgatgtagaaaaccgtagcgtagcaacgcatgtatagaagcctattcatgtgcgagctcgttcaagcaatatttcctacagccaaattctagaataaaaaagagtacgacaacctctggggggtgatatgaactctggcctgtgtattgttggaggaaaggaagctgccacggtgtgaatgcattgctgcaaacatggtaggtgccaatctagtttatttctaaggccacgtattgagcaattactaagttcccaatgttcttccaggccgtagaagtgaagatgtggctcctttccccaaggagtattgttgtctagcatcacaatgtgcaatagcttgttctgcggcaggaaaggtgttcactgagctgggaaatggaatccatcccggttgactcatttcttttatttcctcttttcttcttccaacttatttcctgcccggccctcatccacgtggacttctcaccatgcaggagagaatctgggattctgggaagcctgcgaggatctgaagtatggagatcagtccaaagtcaaggagaaagcagaggagatttacaagtgagcatcagccagggtgctggaaagccttcccttgggcctctgaggaccaccccattgtgcttgaggtgaagataggatgagaggacaacagcctggtagctggctgggccctggtcagcatcagttcactgtacttgccatgctagaaatagttccccgctgctttgggaggtttgggggttccctgaagaaagcctggtgagacatgcagtgtgagtcacctgttcctatgggaatgtgtctaggggttaaaaaagcaagctgtcccgaattacagtgcagagtgctctgtctttgactaaagccttcttaggtgtcctgaggggtgtgtgtgtgtgtgtgtgtgtgtgtgtgtgtgtgtgagagagagagagagagagagagtgagagagagagagaagaagcagcaagatgggaaacctattcctcacgcttccttagagatgtgaggaacacaggggaagggagctcctcccacatgtctgggacagtgagcgcagcttggggtacaaacatgggtgggcacatctcattcctgacatcacggctccagcccccacttgttctgagcagcaataagtctgtccctctccatgactgtctctcctccaaattacacaaaagccaagagttccaggttaaaagggtcagtcctgttttcaatggccaggtggagagggaggggaaggtgtgatgaggctcccaaggttgctgaaagccacactccccctccccaacactcctccccctacaggcctggtgggtgctcctgtcctgctgtggtcccatctctgtgggtcctttcatctgcactggctgcagtggacatgagtcctggatactgagggcccagcattgttagttcatactcacatgcttagccgtgttgcccaaagcccaagcaccacgctgggctggaaccagccctttgcagtcaccagactgtggtgctgaactttgggcagcaggccaaacagccccttccctctgaggacttagcctctggaccctggatgtccttcctgcaaatgaactcagattgcaacaccccggtttccagagaagcaccagcagcattgaagagaaaagcttgaggtctcacttcttcttatacttagaggttcatacactctattgcaaatttgcccagctcctcccacagggaggggatccatgcgctgagagaaatgggggtgcgggtggggtgcagtggggagggctgtcggtccgggaagcttccatgacatcctttgcagtacaatgggtgcctgattgccttacacacagtgacgcacacacaactcctgattccaaaaatctgctacaggaagcccgctgcctctgccattagaccagtttccttccccaggctccctggttatgttatgtaaatctcagtttcaattccaaaattttaatgtacatcttagaaaggtaggaaaatattcatatgagtatttctaattcagcaacagctcagaactggaaatactgagagagctctgcatcccgacatcccaggtagagccacgggctcaggaagtgtggccaagtttggtctaattgggagccttggcctgtctgcccagcgggtcagacctctgggttctgggactatgggctgcctctcgacacagcatgtgaaattcattacaaagcacatgtgggttgggaggagagcagagacccccagaacacctgtgtgaaggtgtcttagcctggtcccaggttgcccctggaatcctggtgcagaaggtgtgaagttggaggctgagttcttcaccctcatggccaggacctaatccgacctgggccccagccccttcttgctctctctcctggaggttggaaacatcaaagttaaatattcatattcccaatactggaagtttcttgcttcaaggaaaaattgcttgacaacctcttcaaaagttcatgctctttagtgtctcctaaaaaaaccaccaccctcaccctcggtaaccgattcgtatcagtccttccctcccaagcagctgtgagctatccatgaattgacttggtttagttacttttgctaacatctccctcccaccccaggctgttcctggccccgggggcgaggcgctggatcaacatagatggcaaaaccatggacatcacagtgaaggggctgaagcacccccaccgctatgtgctggacgccgcacaaacccacatttacatgctcatgaagaaggtaggtgggtccgtgctgtggatacggggtccagataggctttctgtcactaagtacccggaaaattctttagatataggaaaaagagagaggatacgtggatagagctttgccggttgtggcatgcagctaagcatgggggctcatgtctgtaatcccagctctttgggaagctgagatgggaggatatcttgagcccagaagtttgagaccagcctgggcaacacagtgagaccctgtctttatataaaaaagaaagagagagaaagagaaaaaccccagaattgtcaaccgtctcttccacctgtccactggggtggacttgccttgagcccctcacccacgggcctagaggaactcctgtagaagctgtgtgcatccttacgggccccactctgcagcagtagacaggtaggagtaatggcattagtaatgacaacattataataacagccatcattcgttgagggcttacaaggtgcagtcgctgtgcgaaacacagaactttatgctcaaagacagcccacaagttaggctttgctgctccagaatctagtggcttggtcaaggtctcaccagagatggggctgggattcatagccaggtctgcctgggtttcaaggccgagctcttagtttctgctgcagagtgatggcaattctcaccaccctggccccaggcaaatattacacatagaggcgtagtgtctaggagagacaaatttgtgtgtgtgtgattgtagtaagaccctgtgagaatttagatagccctctggattattaacaaagtgcgaatgcggtgggaatttaaaaaaaaatatgtgaagggtacctgagagaaaaatcaatcattttcttaagaaactagaatcggaggctcagagttagccttaaagaacttgtctagtttgattcttctttggtgccatccttgacaagactttctttgggtgcttcaacttctcattatggcaatgatttctttaagggcaaagtatctttataggatataggttatgtgatataggctatttgatataggttatgtgatataggttatatgagatagattatgtgatataggttatggatattggttatgtgatacaggttatgtgatatagaccatctgatataggttatatgagatagattatatgacataggttgcgtgatatagcttatatgagatagactatgtcatacaggttatatgatataggttatgtgatataggctatttgatataggttatatgatataggttatatgagattatatgacataggttacatgatgtaggttatatgatataggttataatgtgatataggctatctgatataggttatgtgatataggctatatgagatagattatatgatatgagttatatgttatagattgtaatgtgttataggctatctgatgtaggtcatgtgatataggttatatgatatacattatatgatataggttatgtgatatagattatgtaatataggttatatgatatagattatatgatataggttatgtgatattggttatgtgatatagattatgtggtatcagttatgtgatataggttatataatataggttgtgtgatataggctatctgatataggttatgtgatataggttatatgatatagattatatgatgtaggttacatgatgtgggttatatgagataggttatatgatgtggtttatatgatataggctatgtgatataggctgtgtgatataggttatgtgatataggttatatgatataggttatgtatataggtttgtgtgaatggtaaatgctgattagctttcctgatttatatttcttctatttagtcttttattgtatcatttaaaagtatttttactttgtttttaaagcatgtaataatttagaattgccgccaagccagattagccattttcatcattttttgaatcagtggggtgtttctgtgtgttttgaatcagtggctgtctctttgtttttgttactagacgattcacagcagggtttctttaataataatcctctttaatgtattttaaaacgttttggttcttaaaaatgtagttttcggctgggcgcagtggctcacgcctgtaatcccagtactttggaaggctgaggtgggcagatcacgaggtcgggagtttgagaccagcctggccaacatggtgaaaccccgtctctaccaaaaatacaaaaattagctgggcgtggtggtggatgcctgtaatcttgctacccaggaggctgaggcaggagaatcacttgaacctgggaggtggaggttgcagtgagttgagatcgtgccactgcaatccggcctgggcgaaagagtgaaactccgtctcaaaaaacaaacaaacaaacaaacaaaaaaacctgtagttttcatacggctttttaggggatgcccagggaggccagttactagccagaatggaacagtcattggtaactgcagaaaagaatggcatatatgcccactggactccctatatgccattacagctatgtcctatggtgaaacactcaacgtatcccagtggctccatggtccctattcctagactctatcctagttctcataacttttactgctcccacttagtctttagaatagtgccatttcaataaatttttaaaatacctcaatccctggtttgttgcagtggcctttgtcccatattgggtatgactagagttttccgctcgcttaaaagtaacgagcattcatgaagcttctctgaaattgcccagagtcccagtaaacagccccataactggactctacgcgttggttgtttttgtttttgctttggtattctcttgcctttacacccaaaacacagggcagaaagggatgtcaatggcttagaagtgggctccatactcctggctgctcatcttccttggaagaaagtcttggagaggagaggtcagatgtgctcttgtctcatgctggcttcactgaaccactccaaggtggatcttcatgtgtagggttacagactgtaattctcaaacttaaaggtgcagcagaattacctggagactgttcaggtagttgttaattgttaattgtttaggtgtcctcatgtgaacaaatgatgacaggcaatgtctccatacatgaccagctgtctcacctgtttggcatgtagcatgcagcatatgagaataagtgaaacaaattaagcagttctgggtctagtgtacttttaactgtagcagcttttatgcaactggctacatttacaacataggctgaatcacagacaatgttgataggatctgaagctgtgagctgtaaaacctgagactgttcaggctcagggtgaatcactcccagagtttctcatcaggacggctggggcaggcctgagaagttcccaggtgaaattgatgcttctggaggggaccacacttgagaaccactgctctcaacacctcccccaacacctttcacccaaggagacaaattctcataacttttccattctactgccaagggaggcttgaaaatggcaagggtattggtttgatttgactgcttttttctctcataattactgttgttttcttgttcccactaggattcttatgctcgctatttaaaatctccgatctataaggacatgctggccaaagctattgaacctcaggaaaccaccaagaaaaggcaagtggaattatctgtaattgctggctgcctgctgcttagtttacagagaagtgagggtctctttcagccaaatggctattatggagatatttgcttgatgaaaatattggggactgggaagtattgctcagggaatgagtgcctcatttgcttcataatgccctgaaatcactctagcaagatttccttagtaattaccaccactaagttttgtttcccctaaagctggcttgaaagagtttagaggatcagaccaataattacccttatcacaaatggaagcttctccttggttttttaactgctactcgttacctccaaactgatgtatgggaattaattaaggtacatccttgtatttaaattgttctaagaccttagagagaatagcagattgcaccccaagagaaaatgctcagtgaaggggaaacggacagtaacgggctaggtattcttgctgcctccggggaccatgttttagaagtccatgaacttgttcattctcacttttctcattggagatgtggatcatctcatctggtagagccattgggacaatggacgaaataatgtcctgaggggcagattgaactcttttccgggggaattcaatctacaaggattgaagatttaaaatataaattgaatggcagcttgaacaaaactgtaaggctttggcagaggtttttccactggcaatcgtgtgtcctgtcccccccaaagtgagtgactgttcccctgtttgctgggtcaacccacactgggctcctttccagcatcttccatcaattcaaaagggggatggccggaccagagcctttatcaaaggagaaaaaacaacaacaacaacaaaaaaaaccaacttggcttcattcttgaggataatggccctgttatgaaaaggagagaaagaaggtctttgtggtgctattcttctgggtttaccaagtaaggaagggagttcagtgcccctggggacttaaaagcttctactttaagccagaagaaaggcctgtaatagctccagtagttctgccagaaagtaatgaggggacaaaagaggagtctcatacctctctctccagatattttagaagttggggcagacgtgagaattctcactattgtgagtgagaattacacgtgaatgcattcgtaaagtgtgaagcctggtctgtgtccataccaggactacagtgggtgtgaattttgttccatgatcccaggtataagacaatgtattcaaactcaatttttgcatgacaagttacccctagctccaagccttcctcttggcagggctggtgagaaatccaatgtcagtgtcaggctttacatcctggtaggggagcccttcttctccttaagatagatataagagttcaaggggcttatgtagtcaaggggcttatgtagtccagaaatatggagtatgttgcaggtctttgtctcttattgctgctgaagttcttggctccaagcttacgtgggccctcaaaggcaggtgggctccactgctcactgcccactacatcacttggatacctagagctttgtcctggctcctaaggccatggcagggagagtttggttccaggaatccagtttggctttgaagaaggttctggcatgtgtcaagatattgcacatgagcagggtaccaccagcccaccagccctcttcaggcctcttccctctttctctgttcactggggcctagctattttggacagtccagctctttccttccttcccagaaccatagcttttgaaaacaaatgctccagccaggcgcagtgactcacgcctgtaatcccagcactttgggaggctgaggcggatggatcagttgaggtcaggagtttgagaccagcctggccaacgtggtgaaagcctgcctctactaaaaatataaaaattagcctggtgtggtagtacatgcctgtagtcccagctacttgggagtctgaagcatgagaatggcttgaacctgggagatggaggttgcagtgagccgaagtcgtgccactgcattccagcctcggtgattcagagagactctgtccccgctgcccaccccccaaccgccccaaaaaagaaaagaaaataaacaaatgctccaactctctccagtacccaagccttcattatccacttctttcatgaagatgttacaaaaagttaagataacaaattgatttctacatactgtagaagttcaatgcaacttcgccaacaaaagggtcttccttgtgcctgacctaaaatctgatggcagttggtactcactctggtctcatcctccaagtggggagaaaggagccaaggttggaccccactggaggttcactggaaaaaggagggaacaaaatatagattctggaccttccagccccagctcccatcaagtgtgacagggtcagtgttgggcaagctgtgtcattttcctccaaccaccaatctgtccttccttccagctccaccctcccttttatgcggcgtcacctgcgctccagcccaagccctgtcatcctgagacagctggaagaggaagccaaggcccgagaagcagccaacactgtggacatcacccaggtcatgagcaagctggaccgcaggagccaactccaaaaagagctgcctcctaaataaatctgtgattcctgggggtggggtcatgcacttgggagaggcaaatgaagaagggtagggtcagagtctagaaggttccattccccatttgtggaggtcatcaggttcatcccatactcctctaactttcttcatgggggacttcctaataccacagcaaccagagcttgttctcccaagcccactcatcaggggacagggtgggcgaaggcggtgggtgggagaggggatcacctgactcaattgctgtgtggctgcctattgtaccttagagagttcttaggggaactatgaactttttcagtaagagccagggggaaaaagctgtctcagtgagagccatagggaaaagtggtacacaaagctctcactgagagagagctttgtctaccactctctgctttggaaaattaaaaagaaggcctctccccatacccaaggcctagtgtttttcagggagatttgtttaaaatagctttatgaagctcctcatcctatctctctaatttagactattgtttccaaatcattctgaggatccgccgaggggctagttgcagggaagtactttctctgaactcccctgctatgcctgcctggaaagaccctgctgagacgtttctcctgttgagtttgttcttagtcataattactggagggttgatgggctctcttcttcccatctccccatccccttgtccatgctggggaaataagcggcttgcgggaatgaaggactcaaatggccctctgaggagcatctttttggctaaagaacaaaggcattgatgtcttcattcatgggaagaggatggtagacatcgagatgagtgaggatcagagatgatactctctaggacattttctagatgttgattcttccctcttctgtaggtgtagacgaggtcagccctgtggtcaggactgggggagaggacagttctaactgaccttggggggtttagaaggtcattctcgaagttaggctcactccttacacttgtgcaagaatgcaacagagatagagcacagaagtgagcaagagaccagcctgaccaagcaggaatactcactcattcagcacgtctattgagcacctactatgtgcaaacatcggtgaataaaacagacgtggttctctctcatggagcttcttctagtctaggactgagacaaaataattaaacaaactatcaggtagctattgctgtgtgacaatcaaccagaaaaatagagcaacattcagcaagtgttcattgttcatgcatgtggggtcatctgtgtggctctgtggatcttggctgggtccactcatctgtctaggagtgttgcagtggcctaggctgagatgagtgagatgagttttctctgcttcatgtacctctcttctcccagcagtcttgcctaggcagaatcccatgctgaagactgaattgcaagggagcaagtagaaacacacaaggcttcacatagtctcttctactttattttattggccaaagaaagtcataaagccagcctagattcaaggggcaaggaaatagactctacctctttagtgagagaaatttcaaagtctcatggcgaaagatggatgaaatttcaaagtctcgttgcaaaagacagggaaagttgaagaatgagggccattgttgtaattaacaacacaaatgcctgcccaaggattataaaggaaattaatgtggtactgggataggaaagatgggatgtgtgtaggctatgcccctgctagctggtgacagagaagcagggaatgagaaagagttggccataagagcatgtggaccaggcagggagaacgttctggggagagagggctgtgtgggcaaaggctcagagctgggaagtagctcagagtgaaccgaaaggccaggtgagtgaagcctgctgggtgagggggaaactgtgcaagatgagtttagagagtgggcaggggccagatcattgatgaccttcaaggctgttctaaggagtctgtggtcactggtttcatgttagcaaaatgattctagcccagaagagggacacttacactttccatttgcactggttgcagaccagtttccactctgaaagtgcatggagggatatgctttgctcatctctcttctggagaatcttggagtcttcccactctggaaggtaccccaagtagaaatgtaaaccattgtaaactgggtgacacgagaggagggactgtatttatctcattcattacttggagcctgattcctgacacccagggggttctgcaccaacatgaatgacatgagtggatgaatgaatgaaagaatgaatgaatgaatgaaaagagccctggatttggagaaagcctcctggttcctgttcctggctctagcactagtcatgtagccttggacaagtcacttaacctctctacatccttatttgtgaaatgaggtatcaggaccagctctaaacttctctaaacagactttgtgaattccgactgggaacccgggctggggcatccattttacttgaagatttggaatgggaggaaaattaggtaatttctaaaagtttcacattaaaataatcatgaaaatattatgaaatagaatgtaaaatgtacatgaatttttaaagatacaatttgagacatcaaaggcattttgtgcttggctgtggcaggctcaggccctgccctccaacttctgggggaacgtgttttcgggctctcctgctgtgtggcctacttttatgggaacatttgagaagcatgaaaccagagaatatttgctgtcccttttggttactccatatgagctgagatgacatacccagcagcctggtggtgagggtggtggtgagcatgttgttgagggtggtggtgagtgtggtggtgagggtggtggtgagtgtggtggtgagggtggtggtgtgggcatcgcatgcattgtggcttctacagggcacagattgtgtcttgttcatctttggctcaggtatctcttgtctcactcgccacaggtttgtgctccagttatctctcattctcccacaggctactatgtgctctgtgtcaggctcatacggggactccttgtgtattgatggaagcctgctcaagttgagacacacaggatctcacaatctaatgagagacacagcacgtaaacaaagcagatgagcattctttattaaatgaatgaggacatgagcgtctcaacactatctgtctagaggaaggaatataaatggcttcatggctaaatggcagcatttatgcttcatagatgtattttatttatgtatttatttattttttgtttgagacagggtcttgctctgttgcccaggctggagtgcagtggtgcaatcatggctcactgcagccttgacctcccaggctctagcaattcgctcatctcagcttcccaggtagctgggactataggtgtgcgccaccaggcttggctaattttttgtattttttgtacagattgggtttcgccatgttgaccaggctggtcttgatttcctgggctcaagtgatgcaccaacctcagcctcccaaagtgctgggattataggcatgaacaattgcacctgccccatagatatattttaaagaccttttttgtgtaagaatctgtggtgagtgctatggtggatacaaaaatgaacaaaatggtctctgccctcaaggggctgacaaggtgcatggatgcaaacagctgtagccggaggcaggatgcagtcgagactggatgatgatcaaggatgatgattgttgattgagaccacaagctggaggaacccagaggtgggagagaattgtttggctgggggatcatgataaggtttttggaggaggcgtgcttgaggtatgtctcaaaggagagtagggtgtcatcagatagagattgggaagtgggcactgcagggcatgtgggcagagcccaggcacggctactgctggcctctaggcagcttattgggtcaggaaaaggtgctccctccaagtaggtgtccttataacacctggctggatttcagtcccaccttgcccctcagccaggtgcccctgagcagcacacagcttgcataaccatttggtggccctgagcacagggtccaggaagcaaagctgggagggtgctaggttgaagatgtatcatggaaggctggaatgtggactcgttactgcagtctcataagcgccactccccatccacccctggctgatttagatgccccttctctggctctccttccattctgctcatacctctgtctgtgaatgctgcactgtatcgaaacattgtttatgtgtctttttctctcactgggctgtaaaactccttaaaaaggagagttagtgtcttgtggggttttgtgtctcagggctagacacagcatgggcttgcagttcgtatgctggatgtctgaagagcttcagcacactggaaatcaggagctgaggagtgaagacgagttaagaagtggttgctgtggtctctgtcaagaggaaggtgtggattaggagggtggtggtgggttcagaggaaagaagagagatgctggaggcaggtggataggacccgattgaaatggggtgatgtgggggaagaaattaaagaagacccagagattttgatcctcctaagacaagggtgatgttaagaaaggtattgattatgaaagaggactggattttgtgttagcagttggggaggcaccagggaggtttggagtcccagacgaaaatgtgtacaccattcatgtaatcaacatttacggagtttctctttctttctttctttctctatctttctttcgttctttcgttctttctttctttctttctttctttctttctttctttctttctttctttttttttgttttgagacagagtctcaggctggagtgcagtggcaccatcctggctcaatacaacctcagccttccaagttcaagccattcccctgcctcagcctcccaagttcaagccattcccctgcctcagcctccccagtagctgggattacaggcacccaccaccacgcctggctaatttttgtattttcagtagagacagggtttcaccatgttggccaggctggtctcgaacacctgacctcaagtgatccgctggcctcggcctcccaaagtgctgggattacaggtgtgagccactgcgcctggccttggagctcttatgtaccagacactgggagcctgcaaagcccctcaaggagttccagactaggaaagagacagacacactgtacaactcactgacacagagggtatcaggactcatagcggagcaagcagaacagaaggagaatgtcaaggaggaagtgatggatcctatctggaggcatcggggaaactggacctcaaagattgagtataattttccaagtggaaggcagagagctgtggttaataattatagttcccccttcttccagaagggatttgaggcagctcataatactataatactatatgatggaatgtctaaaatgatagattgaaaactaattttagacagtagtttgtacacagtgaaccgtggatgactgggttatcaaaactgaatgttacattttttttaagcattaaattttgctctgaaattcctgacaactaccaagcaaacagagagacagattggttttagaattttactgtgtctggttgggtgcagtggctcacgcctgtaatcccagcactttgggaggcggaggcgggctggtcatgaggtcaggaaatcgaagcatcctggctaacccagtgaaaccctgtctctactaaaaatacaaaaattagccgggcgtggtggcaggcgcctgtagtcccagctactcaggcggctgagacaggagaatcgcttgaacccgggaggcagaagttgcagcgagctgagatcgcgccactgcacttcagcctgggcaacgattttacagtgtcatgaagtcaagcattcaagtccttttttacctggatcctccccctactcctaagtcccaacacgaggttgaaaatgtgcttctggtgagggagatttctaatccattcctgttctaggcataacggatgcagaactgaataagatcatcaagtcttatttcatcgagtttgcattttagctgggggtgcggggacaggcagtagataataaataagtgctctgaaggaaaggaaagtaggttcgagtaactctgaattaaggaaggggagtaattttagatgggttcattgatccagaattgactgttgaagatgtgacagtggatggaacttgagggccagagagtggatggagagagaaaagaaggctaagagggaagcttggacgaggccacattttaaaggtgtaagaggagagagaagagttaagaacggagtggcagagctgttaggacgcctccctgagaagatgggtgggggatacgggtgggtggccagcagcgttgagcagagacagtgcctactggatagtccctgggcacccttccacttcccagccaccctgcaattagctggggccacatgtctagttgtggccaatagacatgggctctgctgaggtggatcagagcatggggctccacctccatctcatcccctgctgtggacctgggagtccctcctggcccacacaggactttatgtgaacaaaaaaccagacctttattataagaagtcacagagagtttggagttgctgtagcatagcccatcctgccgtgccgaatcaagaagttgagcatgtcaaggactggcagaggccactggatttagcagtaaggaaatcactggggattttgagtgggtgatttcagcagaatagtgaaggaagaagtcacttttgtgggaataaaggagaagatgttggaagtaaggagagtgagctgtgtgtgtagattaccatttcaagtagtttgggaggaaggcgagagatatagtggtaacttagataatggagggttgagaggaggcatttccaaaggacagcgtgaggtgggggtgtttgccaaatgaggggatgatcctggggaggtggggagataaaataaagaataattgataagagaaagcctggaaaaaattggaggggatcagaccaaagccaagattggttttggagaggaatagtttactctctgatgttgcaactcagagagatttggaagtggaagggaaggaagctgaaggctaagttaaggtaagatcaattttaatgattagggaatatttgaggcatttgctgagagcattgcaggaggagggcagtgtggctacagaagcaaggccatgtgactgcaggagaagtccctgaagtgttgaaccaaacaagtgcttgacaatcactgtgaggcagtgatgatggatgctgaaccaaacagttgagtagaaggttgtcaagctaggagagggaagaagtgtctcctctccttatatggaagtttctgtatgttcaaaggtggcatagagagagatgtacattccatgatactccttggtcagccaagcagccattcaggaaaactttggaattcccagcaactttgtcaatgggaaatgctgtgggatggccacgggaaagagggaggtgttgtcttccagcagtcattgactactttcgatgcagaactttaagaaacccgcttgctatcagcttccagtcagaacagcacttgtaaagggttgatccttaaacatcgctaaatgaacacatctctgtcttgtggttccaggaattttaatccttgaagctagatggtatgagaacagctttttttctgaagccaggcttgaatggtaggggaaggaatgtggactttggggttaggcagacatagttttgatattttagctgggtggctttgaccttcaacctgtctgaagttatcatttctcttagaatgttattgatagtagagagtgtctggcttagggtggatgctcagaaatagctctctctctctttcctccccctttctttctgtcctcttctctcactctctctttcttgctcactctcttgcttcttgtaatctgccaaggctgggatccagagttccagcttctgtgaatagaggggtcaggctctgataacagttttcctctatctgttatgaccactcaacattcaacagagatattcagcacctgttacatgcccagcatcctgctaagtgcttgggatcaccagtgagcaagagagacacccttgcggcatttgctgttcaacaggagagacaattaaaccaaatggtgtgatattatagggaagccacataatgttttgggaagggttggcaaggactgctagcctggtgaaggcagtggagacttggggagatcagcagaggctaaagcagaggggtgggcagggccaggcagggcagttcgttggtgatcaggaccagtggccaaccgggaccatccatcctggaaagctctatgcagctcctagggactcagggctgtgtgcatttgtgtggcttcaccatgatctcaactccaggtatcagctcttttccaccttgcacctccctctccccaacatcagtgtatgccagtgctctgctttccaaccctggagtccaccaggaaattctcatgtttggtagtgaagggactgcaggttctgagggcttgcaagcatctgtggctgctgctattgttccagcaggtggcagcttctcctgctaatgtttaaactatgtgtcccacagggcccgttgaaatcccaaatagcataaaaaataaacatttatttggacaatattaacgatatatttaaatcactatgaaaatctctattatgccgtgtccttagacacctttgaattccttaatgttatattttaaacaacttaacaaacccctctatccatggggtgcatagcttgtgctaggatataagttattctgtaagtacaaggatttcctttatagagttccattttccaacttgacttttagagaaaaggctgctttcattgtgaatattaagtaaaaatataagggccagggacaaaatatgagtaaagacctaagacaattcttggcctattataagccctcaacgaacactagctgctatcatcatcatcaccaccatcatcattgtcaccaccttcatcgccatcactatcaccattatcaccatcaccaccatcaccatcactatcaccatcataccatcatcaccatcatcatcatcactatcatcatcaccatcaccaccatatcattattattatcatcaccgccatcctcaccatcaccatcaccattaatacacaatcatcatcatcatcactatcatcatcaccatcaacatcaccaccactaccatcatcaccatcatcaccatatcattattattatcatcaccaccatcctcaccatcaccatcaccattaatacaccatcatcaccatcatcacctagtagcttcagtcttagagtaagcttgtgctttcttctagctgttggtgttgtccaatatagtaaatcattattctttatttaaggcatttcctgagagatatttaaaacattgtcatctcaaaccatctatcttctctgttctttgagaattttgcagtgcggtcctccagctctccagagaacgttaggatatatttgaggggaggagggggagaagttgatgtcatgtcctctgtctgcagcttctaggagaggactgaccagcaacagtgtagtgactggtcaatcctgtagtctggagtttcatggctgaagtaagggtcgttgctaactgagaaggtcttgtgctagactgtgtcaaatgggatgaccagtatggggtcatgccatgtgttcacccatggcagagttttccccatggggctaactttgcacatttgcttgggggcggtggggaaggggagagtgggaaggcactggaagaggggactttgcacactgcatgctgcacctaaatgtggccctctgctcacctttctgctcccaggaagtgggagttcaggtggccccaaggtctctttcaaattctcaaccacattccgaggacagaaaatgaatttcatctctatgcactacctgctttgccattcattaaaatgcctgtgattgtgttctcatgttaacatacctgtttcatttcatgctcctttactcccttctcttggttcccttgtacaataaaacagcagcatgaaacaaaacaatgctaagctctccttcactgtgtctctgtggtgtcacatttctttgccatgtgtcatgcatgccactgctttgctgcctcacaccaatggtaggtggggcatgggctggaggggctgggtctccaagcagagccccaggctccatgggagggaccaaggtggggaattgtgggaacgggtggaaaagacatctgcttagattgtccaggaccagtaaagctaatggtcatttgcccagaagaaaggaccatctcaggccaggtaagtggccatcttcctcgcctgtctgtcattcatcccagaaaagagaagatgctaggggaggagtggagccagagatggaccgagagaggtaggagggtgggaggagggcacagagttgggggagggcatatagagaggctgatctggtcacaaactttgagttttgtcaagttgcatcatatccatgaacctcagttgtcttatctgtatagtgggatgatagaagtttatcacaaattctgaggaagtggaatggaagttaattctgtatctctcttgacaaagccgagttcctagttttggtatttttggatggcaatgtgaatcagcaaggaaagcaaggccctttgggtcacacagacctggcctcaggttctcatttagtcactgcttcagttttctattgctgcataacaatgaccacaagcaccagccaggtatgagctcagttttccaggagacatttggctgatgtcttgttcaaggggctgtaagggaattccataaactagggaacttatcaacaacaaacacttcccgcggttctgaaggctgggatgtccacgatggaggccccaacagattcggggtctggtggagtcccactttgtggttcatagatggagtctcttcactgtgtcttcccacggtggaagggccaacctagtgccctggggtctatttcataaggatactgatccttttcacaagggctctgccctcatgactaatcacctcccaaagaccccgcttcctaatactatcacctgcaaggggaaggccttcaacatatacattttgtggaggacacaaatcttagacagcgcagctgggttctcagctcagggtctcacattcaaggtgtcagccaggctgacggggttctcatctggatgcttctaagaagaatctgcttccaagctcatttgggttgctggcaggattcagttcctcgtttaagactcaggtcactgtcttcttgctggccatcagctgggagctgctctcagcagctgggggccacctgcattccttgagatgtgccccctccatcttcaaagccagccatggagaccttctccccagttgaatccttgccaagcttccgatctctctgccttctgcctctggcctctagactcagatggaaagggctcctgtgaccagctggagctcacccagacactccccctttttaaaagtcagctatgcctcatcacatagcctgactgggagtgactaccccatcacatttatggttcacgtgtacactcaaggacaggggtgggaatcctacatgccacagtcactgtgattctacatgccacagtcactgactagtcatgagagctggtaaagggtaatgagcccctgtgggcctcaatgttctgttctctaaaatggggtggttatagataagcaaagtacctagcatgtagtagatacttgatacatctacgagccacccttttccacctaacagttgtctcccaagcccctaatcaaggcccagctttccctgctgtacattctttgcagaatgtgtcctaagtagagttgcacctccctatagaagggaaggggttagaagcttagtgcagagtcccttaagcttacagggcagaataatctcagatgtcagctagaaatgctttccttcagtcgcacccccctgatattctccttcagtggggctgtggtggggccaggttctgcctttgtactaagcaccctgagtgattctgatgtggccgatctgtagaccacaccgaggcatcccgcgagcgatgactgcgccgactccgagtcagccagttgggtttcaaagtctgagcccactgttcctggcagggtgtccctggaggaatggctggacttctcttagtgtcctcatctgtaaaatggggataataacagttgcctcactgggtggctctgtggagcatgcaataatccacaatagtggatttgcaattacagtaataattgcaattataatagttattgcaaatgcaataattcatgattattgagtaaagtgctcagtccagggcctcacatttgctgtgttctcactgtgaattaatgatgtgattgttattactataataaccccatggccctgggcgtgggcctggcttttgctctgccaccctgtgggattctgggcagtgagggggaatgatgggctctgagctgctgtttgggaacagaatctcgtttgaacttcagggagctggtgggaaggaatgagacaagccctccatgccctcctggccctgccctcagtggcccctggcctttcttcccccaccagagctgttcttgggtgcgcctgcccttccctgttcaggctgggacctgcccatgcaggtgatctgaaagccaggccaccctctgcaggagccacctgctcagggaccagggctacctccttcagcccgggggcagtgcccagatcccggggtcagccagctctcactgagcagggcaactatgtggctgtgctgtgtgttaggccttttgtgctctgactgtcctggagcccctcacctccttctcgaggaccagagcatccccagcttgttcatgccaggcttttttttttttttttaagatggagttttgctctgtcacccaggctggagtgcagtgacgcgatctcggctcactgcaatctatgcctcccgggttcaagtgatcctcctgcctcagcctcctgagtagctgggattacaggcacccaccaccacatccagctattttttttttttgtatttttagtagagatggggtttcttcatgttggccaggctggtctcgaactcctgacctcaggttatccacccgcctcagcttcccaaagtgctgggattacaggggtgagccaccatgctgggcttcatgccaggctttgatgtggcttgggccacagcaggcctttaggagggaatccagcaaacccaggcccatgggccagtgtgttccgccatgggaaaagtggtgatagcagacaggctcactgaaaattccgattttaatttccttttgtctgctttcaggcaactttgggctgtaaatgccagatttacccctcctggcctatgctctgggggctggggccatggtggcccaggaaggttgagatacttcccctttctccactgaacacctcctcgccatgtattcctgtttccttctccccagcctggcctggttccacattcaacctttcttcctgaccaccccggctctgcctgaggggagatctgggaaggtgctgggcctagaccaccccaaaagggtggtcactgtggatactgggcagggctcagagcaaggaggggcctcaggcccggagcagtcaggaaggcatgagctgggacttcttctgtcacctccacttatcagctaaaagtgttttaaatgcctccagacctgaggttggggcccaaggatggagaaggcagggcatgggctgtggcaggtactatgcattgctcatttggggactggagttgaggggtgatcgggaatgcagcctggccatactccagcatccttggcctggaagaaggtcagttcatgtcccgggatacaactgcttagccctgggactgtgaccagggctgggcgacaggcaggtccctggacaggaggcctctgtgtggctgtgccattgtcataggtagctttggacaccgttcccagctccctaggaggcagccatatcaggcccgcactcttgtcgctggaaggggactaagttagcagaggacagcccaggggccctgctggctggggccatgcaactcaccactgagctctctcctttccttctctacagccgggccagcacatggctcccagcccccatctgaccgtgtacaccgggacctgcatgcccccgtctccttctagccccttctcctcctcctgccgctcccccaggaagcctttcgcctcacccagccgcttcatccggcgacccagcaccaccatctgcccctcacccatcagagtggccttggagagctcatcgggcttggagcagaaaggggagtgcagcgggtccatggccccccgtgggccctctgtcaccgagagcagcgaggcctccctcgacacctcctggcctcgcagccggcccagggcccctcctaaggcccgcatggctctgtccttcagcaggtttctgagacgaggctgtctggcctcacctgtctttgccaggctctcacccaagtgccctgctgtgtcccacgggagggtgcagcccctgggggacgtgggccagcagctgccacgattgaaatccaagagagtagcaaagtaagaacccgaaggggacgtgccgtatgcatgggtggctgtgggtgtgcaggcctctgcatgtgaatatgcatgctttgggctggggactgggatgggtgagaacagataccccaggcagcccactcagatcccttggccactggaagatattcagaaactcagttttgtcctctgctgtcctcccgagggagaaggaacaggtgtccttctttttcatcttccaaatcttttccatttttccaaatctcttttccccttatatgttcttccactcacattgtcccatcccaagaccgttattagtctaagaaacccattgcatctgtaaagagcaggaaagattggtggcagcagtgggagctgcaggtgttgggatgccctgggcatgcttctgggtgctccagcccctccctcaccataagtgcccttgcctcccttcccccaccctaaggaaaccttcccaccctcctctgcatccattggcacagtctcttagagggactttcagggagccttgttctggcagtcatttctgtgaaaatgaaagtgcgtagcctttgcctgagggggggcccctctaaacttcattttgggtggtcctgcaagcctgatctctgagaacccccagttccctgagacaggccagagggggcagaactaaggctctgaggagtgctccataacgcctggatcagagcagaaagaaaacttgtgagcgatgcaacacagagaatcagctcctacacttactgagttttgggggagacagtcaggggcacccctgcaccaatcaacatgtgtttggcctcgtctgggcttggagaagaaagcaccatgcagaagtcttaggttgccagggatacccggggacagccaggcagaggttgttatccctcctgcctgtgtcgcttagggggagagggaggagcaggtgactctagttgccttaggagaagggtcagaatcctgtgtgagtgtgtctattgatttttcccaacaggccctgcagagggaatattccagctttggggccgctgctatgcctcatacatgggcttgggactttaaaaggctctcttctcaagggccactacttcctcagaaggcagttttttgtttgtctgggtgtttttttttttttgagatggagttttgctctgtagtccaagctggagtgcagtggtgtaatcttggctcactgcagtgtccgtctcccaggttccagcaattctcctgcctcagcctcccaggtagctgaaatcacaggcacatgccaccacgcccggctaatttttttgtatttttagtagagacggggtttcgccattttggccaggctggtctcgaactcctgacctcaggcgatccgcctgtctcagcctctcaaagtgctaagattacaggcatgagccacagtgcccagcacccatgaagtcagtttaaaggggttgatgactaagtcctggtatgtcctacagggacctcctgaatccatcaaaaccacagggatccgagcacctcaaaaatgaaaacaaagcaccttcagaattatttttcattcaaaatgaaaatatgaatccccaataaaaagattccaccaagccaatcactgcacacacaacctttgtagtcaaatgctctacccctgagctatacctgcccccaccacagtctttggcaaatgcacctggtatgttcatcttcaaggatgtcaggatgatttggggaggtgcagtccctcctgcccctgcccctacattactggctttcctcttgcacctgaagctttttccagatcaaaatggatgtgcccacggggagcgggacctgcttgatggactcggaggatgctggaacaggagagtcgggtgaccgggccacagaaaaggaggtcatctgcccctgggagagcctgtaaggaaagaggcaggctgagctgggggctctggaccaggaagatgctctgacagatgccatggtatgggccacaggacacacttgctcgagaaccaaagtgcatttgggtgacatttgaagattggggagacaagatggggtagattgtggcaaagaatgctctggctggttaccaggggccaactccttctcctcttcctgaccctccctcccctgggcagaagaaacgcatgtggaccagaagactttccctgctgccttaaaaccaataaaaggttaactttaagtttcttggaatgttagtgtgtgtctggttttgttagtaatttgtgagctattatttatgagttaaactcacgtcttcttcaatcttctggacaaagggacattgagtcgcttccaagagctctctccttgtctaaatgggtttgtgcacaatgcttttctcatcagcagagctccccaggggatgccccggggcatggcatctcacaggaatggacagagggctgggagcaggcacactcctaaaatgccaggtgtgttgcctcaggtcctccaagaagcagacaccaaggtgagattcgatggacaagagatttgttggggaaaacacctgtggtagataaaggaagggccagagctggagaaagttgaagttgagtgttgagggggttcggggcggggggcagtccagaccgtgctgcaagtctgacctctgggcagggagagtcttagatggcagtgcagtccaagaaagttttgaacaggctgctggggtgtcctttatgcagtccaagaaagttttggccaggctgctggggtgtcctttgtgcagtccaagaaagttttgaccaggctgctggggtgtccttgagccaaagtcattgctggagagggcctgcatctctgggaacggccctgcattcgtacccccacggtgcatggtcatgtgctgggagatcccgtggaaagcctgaccttggcatggatatgctggtggatcctgagctgcagcagcttggccatcagcccgcgtgctccctgcagttggagatctgagtgctccttttcacttccgctgcactaggccagtgggaaattctagaggtttgggctttggtgtgctcctcccacctcccctcctagttactcactcaacatgtgtttattgagtccctactatgtgccagacgctatgacaggcgctggggatgttgctgtgagtaggactccttgtctcatggaattcatccgggacagtgtttctccaccaggtcaatgttgccctctagggaacaccggtcagtgtttggagacatttttggttatcaagactgcggcagtgggtgggggttgctactggtgtctagcaggtaaaggccagggacgctgctaagtatcctacaatgcacagaagctcccacaacagaagattatcagttcaaaccaccagtggtgccactgttgagaaaccccgcactagagattacagcgtatgtacttgtccctggtttctgcgcatgctctgaagtattgccccaaacggcactgctgggatcataattagattggacagcgggttgcgattaagggctacgcggtgaataaaacagctcttaaaagttgcataggaagtcctcacaggagaaaaaaatcaagtggtttgccaaaccactcattatacccctcccctttagccctcaacttcctcagaattcaattagtagataagagcccctgacttgcttttaacctctgacaacttatttagcccataaatactggggttgctgactcatctctgcacacttctacaaatgaatgttgggtgggtgcatggctgaaacctagatttgctaatccccgtagggaaaacacagagcttcaatacttaaagaccattgctcattgtagattttactgaatctattccactgggctcacaagagtcactcacaaagggctaagaaaaattttcccccagaatgtaagtgagagagtctggtcctttcttggaagagtgagtgagctgttaacctgatgcctttatttgcaatgctgatctaaaatgagatgaaaggcgaagcaatccacacccttagtttactaccagccaatgtcaagaaataaggagaatctcaaccctaggtttgtatatcagtgtttaagggttcctctcctaagcccccagggtcctaaagagaaactaagcccacatggaaactaagatccacatggatagagcgtcaatgacagaaggctccagaatccactggttggattaaataaagtccaggctatagttcagtaataaatagacctcagaagggaggaagtgggttcaaacatgacagagtttctgtctgtaacacagagttgcctaaaggcagtagggcagtccaggtcatgggctggaagtgaatggaggccagggaagagaaaaaaaaatccaacaaccaataaatttttttatcttgttgctccacccatcccctggtcacaagtatgatgctcctccatcttgtctggacattagaatccactggggaaacttgaaagatcccgctgtccagggcacacgcacagagctgtgacactgggattttttttagcgcctctcccaggtgatgtctatgtccaggtgagcttgagaaccactgccttgaggtagtgattgaagctggttcaccacccctacacccatgcccatacccaggggataactgaaaaagaggcaatggtgggaaggtggcttcatcttaagttcacaaccaggaagtagcatgggtcatttccattcacatcccattggttggcctttggtcacatgaccatggctagctgcacgggagtccgggaaatgtagtcttcagttaggccagtttgtgagtagttaaacttctagagatttagctagaggaaggaagatggggagagtggatattggcggacacttggtctctcccacagtggaattattacacagttttgggggtaatgggttacactaacataacataacgtaacataacataacataacataatgcaagaggtggggcaagaggagacgggagtgaccagttagtttctgtttggccaatatttggtaaatgcctataaaatgtagctatgctgtattccatggttgggtgctttccacttgctcaaggctgaacaccggctaggtgtcaaacaccaagtgaggtcctgggaataaagttgattccctcatggaggtgctatcattgcttgaggagcaagctgggggcattggatctagtccatgttgggggagtgcagggctgtgggctgtgggaatcctgccgcctgcctttccagcttggaacagctccttgatttcctcatctgtgaactgggagtaacaatttgaccttcttcacagggctgcttggaaacctatagagtgatatggatataactgtgttggctgctcagaaccttatgtagtgcaagaaaaaaacagttttgttttttccccaagatgctcctttaaacctatgctgcaagttatttcttttcctaaacctggatgaaaactctgagaagtcccataacttttctggtcacttttagataatacagatcctccaggtatgatcagtgacaaggacagtctccatttagttctgtatgcagttcaatgttagtgtaataagcaaaacttggaacttcattcaaaggtaaggttccttccctccttgggcttgggctgttgcagctgggatgtctgcaggggggtcggaggggggaccccggaaaagcagaggtagggtgggagaacaaggaggttcttagttgactaacacataaaccattcaacatggtgctcttgggatccccctactggctctcacttaggtagagggtttcctagatttttgaggccttctagcctgatatggtttggctctgtgtccccacccaaatctcatctggaattgtaatccccacatgttgagggagggacccggtggaaagtgactggctcatgggggcggtttcccccatgctgttctcacgatagtgattgagtctcacaaggtctgattgttttataagtgtttggcatctcctcgggctctctctctttcctgctgccttgtgaataagatacttgcttctcttctgccttttgccatgattgtaagtttcctgaggcctctccagccatgtggaattgtgagtcaatcaaacctctttttaaataaattacccagctgcagttagttccttacagcagtgtgagaatgaacgaacaccactaacagggtgaaatcattgagtctgagaggaggcagggctgcttcctgcttatttgctgaggaagaaaagaagaaggccaatgattcatgagctgggaaggctgaaggaagccgggatccggggatacttcatgcctcacacaccccagcttcagaggtcagccctcccctctgggcagctgtcacctcctcacacttcaccagaagagggagtcctaggctcacagatccctaaagagaggcggctgggagtttcttgttagcattcagagacctgtgtcagagaagggagaggggcttgaagaacggtgccttcctttttggaaagccagattggggtgtgggggtagcaggataagctggccaaagtggggacccatgagagagaagcatcttgtctacctgtgcaaccctgggtgactgtggggcccttatgtggctctcctggctattgtgagcttatggggaccagggatggggaggctgggaggagggaggcaaggctctgtccctagtggctttgagtgagggttggaaccctctgcagaaaatctccagcagaaagaaagaaaaccccctccctctcctgccgactgcggccagaagaatcccactctcgaagggcatttgtgtcaagctctgactcctaggactggaggcccacgaagcctcattcatttttcttttttagagacagggtcttgctctgtcacctaagctaaagtgcagtggtgatcatagttcactgcagcctagaactcctggtgatcctcccacttcagcctcccaagtagctgggattacaggcacttgccaccacacctggctaattttttaatgctttttgtagagatggggtctccctgtgttgcccaggctggtcctgaactcctgggctcaagtaatccttctgccttggcctcccaaagtgcggggattacaggcatgagccactgtgcctggtccctcattcatctttgacgacaacctgagggattacagctcccctgctgagggggtgaggcttgagctggggcacccagagggaccagaatggggtggcatgtaggggggataaacgggatcagaaaacaatcttttaaactattcagctggtaggagagacctgtgtatggcctcatgagaggcgactgagggaggggcagtctctttttcttctgggaagaacagaatgagagtattcatggactcctgggagtggggggagtatatttattagggacagctggcttgggatattggctctggttacagcagcatcagctatgtctaaggaggggcgggagcctgcgtgcatagaggtgcgcgtgtgcacacaagcgcccagggccacactctggtccatgcacagtctggtccatgcaggcatggactgtctgtgtggcgcatgcatggagcgctgtggctatgcgcctggtactggcacaggtgtcaggggaacactatgccacctctaatacagcggttactccatgggaacatggagaggcttgtggaaagcatcaccaggatgtttgtgagaagctctatgctttacgaagcgcacttctgtctccctgacccatcatgtttagggaaaggggagcgcagtgtgttagacgaggcagctggggtacggaggggctaaacgaatgtgaccaaagtcatactctgggctggtcctgggcacattacagcaggtctccctacagagcctttagaaaacgttttcacagtccatcttctaacttttgcacgctttattccctcaccttaacccgtaggtagctatcaagttgttttgtcgtgaaggactccatcatggggagttagggattcagacaaccacagcttacaggcctacatttaaagatcccctcgtgaattcctgctcacatttagtcctcactacagtgttgggaggcgggagaccaccttcagtttgcagatgtgatttccccacttacaagtggtagaaacactccaattgaagcctaatgccatttattctctctttctctgtatatacacacgttatatattatgtatgtaatctatatttaaatttcggaattttggccaaccacagtggcttacgcctataatcccagcactttgagaggccaaggcggacagatcacctgaggtcaggagtttgagaccagcctggccaacatgacgaaaccctgtctctgctaaaaatacaaaaattagctgggcatggtggtaggtgtctgtaatcccagctacttgggaggctgaggcaggagaatcgcttgaacccgggaagtggaggttacagtgagccgagatctcaccactgccctccagcctaggtgacagagcaagactctgtctcaaaaaataaaataaagtaaaaaaataaattttggaattttgaaaatacagaaaatacaataaattatataataaacatccatatgtatattacttagaattgcctaaagttaacattttgccctaattatttctaatgcttaaaaaaaggtaaaattttatctttattctccttttctcatctaccgtccctctcatcttctatgtcaacaatttctttttcagtaaatggtcagttaataaatattttagacgttgcaggccacatgtggtctctcttcctcctcctccttcttctttcttcttccctttccttcaaccactaaaaaatgtaatatcaatcaccctttcctgataaaggtttaatacccagaatatataaagaattcctccaactcaacaataacaacaaaaacaaacaacttgattagaaaatgggcaaaggagcaggtgtggtggctcatgcctgtaataccggcactttggaagaccgagatgggcggatcacttgagctcaggagtttgagatcagcctgggcaacatggtgaaaccccatctctgtcaaaaatacaaaaattagccaggcatggtggtgcatgcctgtagtcccagctactcaggaggctgaggaggaggatcaccaaagcccaggaagcggaggttgcagtgagcaaagatcatgccactgcactccagcctgggcgacagagagggactctgtctcaaaaaaaaaagggggggggagtggaggggcagtgggcaaaggacttgaatagacatttctccaaagaagatatacaaatggccaatagcacctgaaaagatgctcaacatcactaatcatcaggaaaatgcaaatcaaaactacaatgagatatgacttcacaccaactagaatgtctgttataaacaccaaacaaaataaaacagaaaaatggtgtagccactatgaaaaacagtatagtgtttcctttaaaaattgaaaacagagttgccatgcgatgcggtaattccatttctggttagatatccaaaagaattgaaagcagggactcaaacagatatttgtatacctgtggtcatagcagcattaatcataatagctaaactttggaaacaattcaaatgttcatcagtggaggaatggataaacaaaatgttgtctatacatataaaggaatattgttcaacctaaaaaggaaggatattctgacacatgccacaacatggaagaaccttgaagatgttatgctaagtgaaataagccagtaataaaaggacaaatactgtatgattctgttggaggtgttcaatctcgagcaactccatcttgaatagaggctgggtaaaatatgtctgagacatactgggctgcacccatgaggtgaaggcattcttagtcacaggatgagataggagatcagcacaagatacaagtcataaagaccttgctgataaaacagcctgctgtaaagaagccagccaaatcctaccaaaaccaagatggtgacgaaagtgacctctggtcaccttcactgctcattatgtggtaattataatgcattagtatgctaaaagacactcccaccagtgccatgacagtttacaaatgccatggcattgtcaggaagttaccctatatggcctaaaagggggaggaaccctcagttccgggaactgcccatgcctttcccagagaactcataaataattaaacccctctttagcatataaatcaagaaataactataagtatcctagtccagcagcccaagctgctgctctgcctatggagtagccattccttattcttttgctttcttaataaacttgctttcactttcctctgtggacttgccctgaattctttcttgctcaagatccaagaaccctcttttggggtctggatcaggacccctttctggtaacaattctacttatataagatacctagagtagtcaaattcacagagacagaaagtagaatggtagttgccaggggctgggatagggatggtgggactggggaatcagtgtttaatgggcacacagtttcagttcaggaagacaaaaacaattttggaaacggatggtggtgatggttgcacaacaatgtacttaataccactgaactgtacacttaaagatggttaaaatcataaatttgatggtatgaatatcttaacacaataaacaaaactaaagtcattcttatcagaagactacaaaaataagctactggctggatttagctcaaggtcaaagtctgttaaactttgtgccatattattattaatttcattatgtttttaaacaaaataactcattagcggtgttattattgtgtattatagtcaattcttttttagcatcagctacaagtttacccaaatttgtgctcatcactcctctttggataccacttctttttcctggtccagttttctttgtactgaagtgcatcctttagtgattctctcactgatggccttgagagaaaagtctatttttttgttttaaaaatgtctttattttatcctcaacactattttaccctattattattttaatcatttactattaaataatcatttaggtgaattgaaaaagataggttgagagtaatttctccttgggaattcagatagtatttcatcatcttttgtcctgtcttgttgctgatgagaggttcaattactgttgcttgttgtgggaagccaggaaccccaaatggagggaccggctgaagccatggtggaagaacataaattgtgaagatttcatggacatttattagatccccaaattagtacttttataatttcttatgcctgtctttactgtaatctctgaacataaattgggaagatttcatggacacttatcacttccccaatcaatacccttgtgatttcctatgcctgtctttactttaatctcttaatcctgtcatcttgtaagctgaggaggatgtatgtcacctcaggaccctgtgatgattgtattaactgcacaaattgtagagcatgtgtgtttgaacaatgtgaaacctgggcaccttgaaaacagaaccggataacagcaatgttcagggaacaagagagataaccttaaactctgaccgctggtgagctgggtggaacagagccatatttctcttctttcaaaagcaaatgggagaaatatcgctgaattctttttctcagcaagaaacatccctgagaaagagaatgcgtccctgagggtgggcctctaaaatggcccccttgggtgtggccgtcttttatggtcaagctgtagggatgaaataagccccagtctcccatagcactcccaggcttattaggacgaggaaattcctgcctaataaatttttggtcagaccggttgtctgctctcaaaccctgtctcctgatgagatgttacctatgacaatgtgtgcccaaaacttcattaacaattttaatttcctcctggtcctgtggtcctgtgatctcgcactgcctccatttgccttgtgatattctattaccttgtgaagcacgtgatctctgtgacccacaccctattagtacactccctcccctttgaaaatcactaataaaaacttgctggttttgtggcttgtggggcatcaggaatctactgacatgtgatgtctcccctggacgcccagctttaaaatttctctcttttgtactctgtccctttatttctcaacccggccgacgcttagggaaaatagaaaagaacctacgtgactattgggggctgattccctgatagttgcttaatagattttcttctctattttgcctctaagtactggtctttgtcttgagtgttctgcagtttccctatagcatgtctaggtacagaggtgtttgtgtttatccttctgggggtgatgcttcttccatctgaggactcatatcttgtttctactccgaaaattctcatttattgtcgctggataatgcttcctcctcctctccattttctttgctctctctcttttggcagctcctactgcatgtttgttataccttagggagaagtgtctcttttctcgagtccccttttcctgccctgggcagcccttcaggaatttcacctgatggaggggtcttaggtctggttttccaagcctttggaccacaggccatttcctgtcactcttccctggggccaaagtagttgttctcttcattcagtattaattccaagttttctgataggagggagttcatgttagctcagttgtcctattgttagagctgggtgtccaccaaggactttcttttccacaacaacatagctgctgcatatgtgtcatatattgttatacacatatatttcatatacttaaatgaatatatttcatataaattcatatgtatattttatttatatatacacactctgctctaagttatcaaattatagtatttccttctccattgtagctccattttaacagggacctctggcttaagaaaatgcatctccaaacttggaattgtaggcaccacaacaagctgtaacttggggacagggagattcacacttctttggggatgctttatgaggctggctctggctttggccctgctgtgaagtgcctctttgatttccatcctaaacacacaaatgtgtccacaccatctaccctcatcattccatccatctgtcaattcctctatccatccatccgtccatccatccattcatttatccatccatccatttatccattcatccatccatccattcatccatccacccctccatccactcctccacccatccacccatctatctgtccgtctatctcataagatccccttggacccaccaatgtcatatgagggttatctaaagccgaaaacatctgaacaaacagcagccaaagcagggaaaaaaagacccaaaataccttatctaaacttttttcttttttttttttgatgacttaataaaagtctcctgaaaatatagctaccataaatactctctccaggaggtttacagacagaaaggagatggaccactcacacttggataagaaattatataaacaaaaaaaatcaaaactttccatgctttctgcttgtttctcattagctccccatcatttgctctcctggaaagtcttaaacccccttcttattaagatgatgtataaatccttacctctcactattcagagagatagatttttgggaactcttaggtatgcaaataaactttgtcttttcccaacctgtttttttgtcagttaatttgcaggcccccaaccactgaacctaagttggtagagggaaacatttttcttcccctcacaccatagccatccatctatgcactcctctaagtttcatggagggtccactaggcatttggtatgctatcgtgaataaaattaggccttgatctcaataatgcataggttagatggggagcatacttttaaactaagaattacaatacactgtgttaggagtggctgcaaaacttgacagctgagggtacacactctggtgtcacactgcttccggtcagatccaggttctaccctttcctagccaagtggccttgagcatttcactaaagctctccaaacctcagttctctcatccataaacttgacatcagaataacacagcctccttgggggtcagggtgtgaggatcaccagctaacttatgtaaacagctcagatcagtggctgggacctggtgaatgcttgatgaatatttcctccaaggtagtgttgaagcaaagaggaaccttgagagagtcttgctggccccagaatgtggctctgtgtgtgtgtattgggctagtgtgtagaaagcattcgttcctttgatgaacatgtagcagaaaaggtcagaaacataagaaaataatcacagaacacttacatttgataaatgaaaaataacatgttaaaatatgatcccatataaaatgagaaggcactgaatgaaggagacaactacttcagtaaggagctgaaataaagtattttctgggatgatcgtgtccttggaagactaggagtcagtgttcagggacaaagaaagagcagtgcctatttcaagctgtagggaaatctgggcacctattcaggaactgttatggctggctctgtgtctccacccaaatctcatgttggattgtaatttccaatgtcaggggagggacctgatgggaggtgattggatcatggtggtggatttttcccttgctgttcttgtgatagtgagtgagctctcacaacatctggttgtttaaaagtgtgtagcacctccagcttcattttctttctcctgctcccaccatgtaagatgtgctggctttccctttgctttccaccatgattgtaagtttcctgaagcctccggtacagcctgcagaaccatgaatcaattaaacctcttttctttataaattacccagtctcgggtagttctttatagcagtgtaagaatggactaatacaggaacacaacaagctttttatccagcagcatccacatacttgacatacttgacccaagtcgcaggcttccattgcatatgggattagttagacattagaaagacctagatggcagaggtctctgctttttttgtagaatgcgcagtcctggtccttccctctgctaaaccttagtcttttctccctattcttgggcttctaggcaaagggaatttgaaggattgcagtaacacagtactcttgggacttctggccagtcttctgggtaggcctttgtccctgtgtcatggttcttgaattttgtgtgtatggctcattaccttcatctcaatatatttcaacaatgggaacttctgcggggcacaactcatgtccacagcctcgtctatgtacagagcccaaagcagcaccactatcagtttggggtttagggtgttgaagatgttgagttgtcagttattgagttaaaaatctcctgattatatagaaaatgtccagatatatcactttatcaatggaggccaatattgtgaatgagtggcccttttattatttcacatttatatctcccatttaatctctagcattcttgttaaaacagataaagtccatgacttcacagcagtcagtggcctggaattttgtctttttaaaaagatttctagctgggcatggtggctcacgcctgtaatcccagcactttgggaggccgaggcgggcggatcacgagatcacaagttcaagaccagcctgaccaacatggtgacaccccgtttctactaaaaaatacaaaaattagccgggtgtggtggtgtgcgcctgtaatcccagctactcaggaggctgaggcaggagaattgcttgaacctgggaggcggaggttgcagtgagcagagatcacgccattaccctccagcctgggcaacagagtgagactccatctcaaaaaaaaaaaatttctaaaggtgattttactgaaacactagtcgtgctggattagggtgggccataagcccaatgaccagagtcttcatatgtagtgggaggacaacacagaggcacacaaaggtaagaagttcatgtgaagatggaggcagagattggagtgaggcagctgtaagctgtggaaccccagggattgcttggagccatcagaggctggaagaggcaacaaaggaccctcccctagcctcagagggagcacagccctgccaaaaccttgactttggacttgtagcctccagaactaatagagaattaatttccgttgttttaagccaccttgtttgcggtcctttgttacagcagctctggggaattcataaggtaggcttgtatcatagttcgattattctcctacagatgaacattgtttccaacttttcatcaaaacaaatgctgttgtaatgaacatccttgtacattcctctgtgcgcatctataagtatctccctgggatggaaaccaaaggccaggtatggtggcttatgcctgtaatcccagcactttgggaggccaaagtgggaggattgcttgagcccaggagttgaagataagcttgggcaacataggggaccctgtctctacacaaaatttttcaaaaattagctgtgtggtggtgcatgcctatagccccagctacttggcaggctgaggtgggaggattgcttgagcctgggaggtcgaggctgcagtaagctttgattgcaccattgtgctccagttccagcctgaatgacagagtgagagcttgtctcaaaaaaaaaaaaaaaaaaaaaggaaaagaaaagaaactaaaaagaggaatcgctgggttagagtatgcatattttaagaccaatcttccatgccaaatagtctttttaaaaaatttattttattatatttgtttgtagagacaggggtctccctatgttggccaggatggtctcaaactcctgggctcaagcaatcctcccaccttggcctctcaaagtgctgggattacaggcatgagccaccatgcctggccaccaaatcacctttttaaagtctgtactaatttagattgctaccaataatgcatgtatgaggataatcatgcccttacatcctagctggaactgttaggaacactttcacattgttggtgctagcatttactgcagcagtgagaccacgtggggctgagcaccacattcttctggaggccaagaatgttaggggctctggtcctcctgcaaactcctaaccctgggaggacagagatgataaggatgaccagagagactgcagggcatgagcctccctgcctgtcctctggtgtatcctagcctgtgccaggtgattcagcctcagtggggcttttggtgcttgtcttgtgccaccagcatcagtggtcccagtgtaaagcttaacaggaaatcagagaatctgttacatttcactctgtatctttttttttttttgaaaccggatctcattggttgcccaggctggagtgcagcggtgtgatcagggttcactgcacttaaactcctgggctcaggtgatccttccacctcggtctccagtgtagctgagaatataggcatgcaccactatgccaggctaatttttttttttttttttggtagagacaggatttttccatgttgctcaggctggtctcaaactcctaggctcaagcgatctgactgccttggcctcccaaaagtactaggattacaggtgtgagccactgcaccaagcctgtattattttatttatttatttatttgtttgtttgttttttgagatgaagtcttactctgtcgcccaggctggagtgcagtggcctgatcttggctcactgcaacctccacctcccaggttcaagtgattctcctgcctcagcctcctgagtacctaggattacaggtgcatgccaccacacctggctaatttttatatttttagtagagacagggtttcaccatgttggccaggctggtctcgaactcctgacctcagtgatccacctgtctcggcctctcaaattgctgggattacaggcatgagccaccacacccaccctgtattattttaatatgtgatttatctttctgaaagtttgtgaagtcgttgggattggggactatgcagtcctctttgcatccctagacatagaagagcctgttcctggaagggacggaagtgggaaactgttttagcctccttgttggggttccgcccttgaggctgctggtgccctcatgtcttccccagtaacacattctgtcctggaaacataagtgtgacatcccactcccctatggagtcaggcttcaggatgtcagttaccagggcaggttggcctgaccccagaaagtgactcagattccccaggcacacccttgtcccttgttgtgggaagtctcaccccggagaggctgactccagggttgttgaaatagagcagccaggttctgccgatgactgcttaaaattcatgttgccatggtagcatggcattaggccaccggtgatcctgctgcacaaagctttgatctcggagaaggcagagtttcttttgctctctagctggttctaaggggactgccttgggaccaagctttggctttgctcctgggcctggggattgtcctagaagcagagaactggggacagcaagacagagaacaagaccctcagaagtggactaagccccgagactgcgattccagtcggagggacttggctggaaaccctaagggcaagagatctgggtctgaagagagtgcagtcagatagatctgtaatgaggggatgtatatgcactgcttgacttgagagaaaagtgcaaatgagatggtctgtgtgtgtttttagtagcagagctaagaagagggtggcttataaatgggctggctcagcatgtctcagcattgtttgtaacttacgcattcattcaacacccattgattgaggatatactatgttggtggtgccggaggatgtgaatggctcacatggcttcagtccctgaggactttcccagctgtcagggcatgaaaatgcactaaaataatacaaagcaggctggacgtggtggctcacacctataatcccagcactttgggaggccaaggtgggaggatcacttgaggtcaggggtttgagaccagcctggccaacatggtgaaaccctgtctctactaaaactgcaaaaattagccgggtgtggtggcacgcgcctgtagtcccagctactcgggaggctgaggcaggagaatcactcgaacctgagaggcggaggttgcagtgagccgagatcgtaccactgcactccagcctgggtgacagagcgagactctgtctcaaaaaagtaaaaaaatgataaaaataaaaaataaaataatgcaaagcagaatgtgttcaattgtctggagatgatgacatttcagagggaaagaatcaccccaccggtgcaatcagggtatccctagatgaatttgggttggacctcaaatgacagagagagaaacaggaagcatctagttggagggtagggcaagaacaacagtgtggcgaggggatgggggcaaatgtgagaaccacaaggagtttggttcattaaagggatggaaggagataatattgtaaaggtaggttgatcccagagctgaactgactttagacttaatttgacaggccttggggagccacaggaggattttgggcctggcagtggctgattggagctgcactttgaaaaaatgaatctgggtgcagctgtagaatggactgagaagttaagcggctataagtttttgaaatctccatggggctgaagaggtaaggagactgtgttagggtgacatgatggctctgggatggaaaacgaaagaacagcctgatagggatgaacaggacctggaatgcgacctggtggaggtgggaaggagaaatggagtcagtggaggctgagatgcaaaacctagttgtattctggcactgctataaagaaatactggagactgggcaaattataagaaaagaggtttaattggctcgtggttctgtaggctgtataggaagcatagcaacattagcttctggggaggcctcaggaagctcccaatcagggcagaaggcaaagtgggagcaggcacatcacatagcgagatagtgagaatgagatcaagcaagaaagagaaagagacagagagagagagagaagccacacactcttttttcatttttcttttctttcttccttttctttttttgagatggagtcttgctctgttgtccagcctggagtgtaatggcgtgatcttggctcactgcaacctccgcctccagggttcaagtgattctcctgcctcagcctctcaagtagctggaattacaggtgcccaccaccatgcccggatagtctttgtatttttagtagagatggggttttgccacattgacccggtctcaaactcctgacttaaagtgatccgcctgcctctgcctcccaaagtgctgggattacaggtgtaagccactgcatctggccacgtcacacactttttacaaccagatctcatatgaactcagagcaagagctcacatatcaccatgaattggctgaagccattcatgagggatccactcctccatgatccaaacacctcccaccagaccgcacctggaagattggggattacatttcaacactagatttgggctgaggtggcaggggcacagatatccaaactatatcaccagtgcaatagaggaaggcactgccagtccacggggccaggaaatcaggaggaggaagcagtgtgggggagacgagctcatgacggtgagtttgaaaacgactagcttgtacctgggagaggaaacaggactggagatgtagcctttggtgacatcatcctcttgacataatggaaatattggggtccaggaagggaggaggcattgagggacagaattgggggtgtgggagaggaagtattaggacagaacctggaggaaagctggccttagggagggaaggtagggagggaggccagagaagatgaaggagggcctggtggtggaagtgcatggtgaagattcaggaagcatctgccacatgctaagtacttgctgcatacaccgtcatttccagtggagcattccagggaactgagactgagaaaaagccactgccttctggaaaccaagttcaagagttaaggaatgggcaagagtggtggctcatgtctataatcccaactctttgggaggctgaggctggcagatcgcttgagcccaggaatttgagaccaacctgggcaacgtggtgaaacctcatctctacaaaaaaaaaaaaaaaagctgggtgtggtggcgtgtgcctgtagcctccagctactatggaggctgaggtaggaggatcacttgtgtctgggaggtccagcctgcactgagatgtgattctgccactgtacttgaatgagaccctgtcaaaaaaaaaaaaaaaaaagaaaaggaaagaaaggaaaagggaaaaaagagttaagtaatgaatgctataggcctgagaaatttggcagtgaagagaatgagagatgatgctaacagggtcaagggaagattttttttttgtgcttttattctcttgcaaactgaaatttctttttagaatgagtagaccatctagagtcgttatatgacccagccactccactcctaagtgtatacccaaaagaactgaaaacgtatgtttacaaaaaacttatacacacatgctcacagcagcacgattcattcataataactgaaaagcggaaacaatccaaatgtccatcagcagatgaatggataaacaaaatgtggtctatctgtataatggaatattattctgccattaaaagaaatgaagttccaatacatgctccagcactgatgaaacttagaaacattatactgagtgaaataacccagacacagaagaccacacattgtgagtccatttacacaaaatgcccagaaaaggcaacccatggagacagaaattagatgggtggttgccaggggctgggagaggggagaaggaggagcggctgctgatgggatttccttttggggtgatgagaatgtgctggaattacacagtggtgatgtttgcaccactctgtgagtatactaaaaaacaatttaatggtttgcattaaaaaaaagaagaggtagatcaaatactctctttagatgaaaagcttatgggttgaatattggagaggataagtggcagagcaaggaagatgggggaagtgatcatggccaaaggtaaaacaatggaatctaggagggggatgttccttccttcccagggatcagagcaaagaaagagacgcagcagccacctgctccaccaacacagcaggcactgtggccagggcccgtgccacacttaggggtccacagaaatgttttattttcttttaaacttaagaaaaaaaaagatcaatgcaattcaacttggattatattcatctttataccaacacagttgtaatgtacataattttgtatttttttaaattctgtgaattaaaaagtttacatcaagggctgggcgtggtgactcacccctccaatcctagcactttgggagctgaggcaggtggatcgcttgagtccaggagttcaagaccagcctgagcaacatggtgaggccctgtctctacaaaaaatataaaaaattagctgggtgtggtagagtgcacctgtagtcccaggtacttgggaggctgaggtggaaggatcacctgaccccaggaggtgagggttgcaatgagctgagatcatgtcactgcactccagcttgggtgacagagtgagaccttgtctcttaaaaaaaaaaaattcacataagtgcccagggcccataaaagtcatagtgaggtcctggatgcagtccgagaaggaagagtgagatatggaggggacacactgtcttttaagaaaggcacaaggaaggccagcagtgggagctggaaggaagaaacacctgatttcaatgaggttttggcttttctgagcacgttcacggactttctctcaggcaatcctcaaacatcgtttgctattcacagccccattgacctttgaacaacacagatttgaactgcacgggtccactgatacacggatttttttcaataaatatactgaaaaattagggagaggggatttgtgacaatttgaaaaaatggacaggcaaacctcacagcctagaaatatggaaaataattaagaaaaaggtacgtcatgagttcataaaatagatgtagacgctggtctatttgtatgtcaattgacagtttatgttattggtaaagcgcctggtcactgttggctattggtagttaagttttgggaggagttaaaagttatatgtgaatttttgactaggtaggggttggtgcccctaaccccggtgctgttcaagggtcaactgtattcacatactatgcattattatagaagattgtagcctttttcctccagcacccaaaccgcaagcacaatgttgatgacatataggcaatttgcactctttcggaagacttcaggtttgctatgtttcttatgagctggtccctagatcccaagactactaggggttatatggataatgtcagctcactctccttgtcacttaatttcctattccctctccctgtgcccctgctggtcctttcaatgcctttgtgcaaatcagaataaagctatcttctccagataatcttagtccttcaggcagtggcttggcaagcactctacccctttgtgcaaattccaaaaggcaccctttcttctaccattcagcttgtgaagaggagcaaaggctagatttcggtctttgctgatccccacggctggggacccaacctgtcgactgtggcagggacccatctcctcctcacctctgagcttaggatgtggcatccttggtatcctccatagtcattggcttacctggcacatccagactttgcaaattcttgaagaaaaacatcatggcttttacttttcaaaggtctgcatctttttactgcaatgtaagtttctttctttcttttttttttttttttttaagatgaagtctcgctgtgtcactcaggctggagtgcagtggcatgatcttggctcactgcaacttctgcctcctgggttcaagcgattctcctgcctcagctttctgagtagctgggactacatgcaccaccatgcctggtcaatttttttttttttttttttagtagagacaaggttttaccacattggccaggctggtcccaaattcctgacctctagtagtctgcctgccttggcctcccaaagtgctgggattataggtgtgagccaccgcgcccagccttggaatgtaagtttcttatttgcttttttttccccataggagatgcctcatgaatttttactgttactactaccttccagttgctgggttctgttttaaaggctgactgtgtgagccaagcattacatctctctctctctctcacccacccctaaacacacacacacacacacacacacacacatgcacttacacacacactctcattgactcttcacagtcgtgtaaagcaaatacatccccgtattcttttgataggctgccatgacaaaataccacaggctggggggtttaaacaacagaaatttattttatcaaagttctgaagtctgaaagtctgagaccaaggtgttggcaggtttgctttctcctgaggcctctctccttagcttgcagacggccaccttctcactgtgtgttcacatgctcatctctctgtgcttgtgtgtgcccagtgtctctgggctgaggacagatggtggaggcaagggtgaaagcaggaggaccgtgcatataagaggctctcagataccagggcgagaaagcatggtgtgttagaacgcagtggtgagagtggaagtgtgagagggatttgggttctgcttatattttgacatgaaagctgaggggtttcctgatggctgggacatggaatatgagcagaggaagagtcaagagtgactctagattttctttggccacagaaatggagaagatgacacggactttattgccttgggggagagcagttattgggaagagtttccttatggacaggttaagtgtggctgtttactggatactcaagtaggaagtcaatatgtaagtccagagctcagagggttacctgggactgaagttataaacatgggatttctccaacttatagatgagatcacccaaggagtgagtgttaatggaaaaaagtaaaggcccaaggatggtcttgagggtggtctacaactgcaggtcatgtagatgaggaaaagccagcaaagagtatggcaaagtagcaacagatgaaggaagagaactagacaagtatcgtgtcctggagaaagggaagaacatgtttcaagaaggagagagtgatcagtggtgtcaaatgctgctgataggtctaataaagtgtgggcttattcaccatggctttaatgatgtggagagcattgatggccttgatcatcaattttcggtggggtggggggcatacagtggtccagtggacttttgggttcaagagagtaggtacagagaaaaataggagacagtatggaatgaaaactttctttcaaaaagttttcttacaaagggaggatgaaaatgggacactagctagcacgaggagtagggccaaagagtttttaattttaagacggaagaaataacagcatgcttcgcagttgatgagaaagattcaatagtgagggggaaaatgaagatccaggagggagtgggaggggttctggagtgatgttcctgccagggagaaagcggatgaggagaacgtgcaaggggagggatgagcttctgctgggagcacagaagatcagaggagaggccgggtacacaggaacagatgcagggaggtggatggatgtggtaatgggagcaggggagagctctcttccagtggctttgatttctcagagagagagcaaagggacatggaagaggagttaccggtagtgtgtggagagtggggattccagatagtcatggaggagagtgggagtgagaatgagtgaggtgagtgcagagggttgcctggcagcgttaaggacccatttgtggtgagagagcacgagctggcattctgcattgtagaatgcagaattgcatgagcttgcattttgctttatgctacaagttttcataggcaaatgcctcagccccactactaacttataggtccaaatatacgtcctttactccactctttgtgcaggctgactctaaatatttgacctcataagtaatgcttctggtaactttcaacttctccttttcccaaggcataattaaaattcccttctaacattccctactcacctttacatagtaggtaggaaaaaaatgctttatccttaagcaactttttctttcacatttctccatacctctttgacccaccatgggtgaggatatgatttggctctgtgtccccacccaaatctcatctcgaattgtaatccccacagtctccacatgtcgagggaggaacccagtgggaggtgattggatcatgggggcagcttcccccatgctgttcttgtgatagtgagtgagttctcatgagagctgatggttttataaggacctctttcttcttcgctcctcactcttctctttcctgctgccttgtgaagaagatgcctgctcccccttcgccttccatcatgattgaaagtttcctgaggctttcccagccatgcagaactgtgagtcaattaaacctcctttgtttagaaaatatccagtcttgggtatttctttatagcagtgcaaaaacagactaatacaatgagcataaaagtaatagtattatttttcctttcctcatacatgttagtggtcacttatatcccatctcagtgattcctaaaacttagcagcattttttttttaagacacagttttgctcttgtcgcccagactggtgtgcaatggtgccatcttggcttattgcaacctccgcctcctgggttcaagcgattctcctgcctcagcctcctgagtagctgggattacaggtgtctgccaccatgcctggctaatttttgtatttttaatagagatggggtttcaccatgttggccaggctggtcctgaacttctgacatcaggtaatcgacccgcctcagcctcccaaagtgctgggattacaggcgtgagtcactgtgcccggcctgcagcttttaaaaaaattattactgtattccactcacatataccaagtttaaaaggaattaagaaatggagtttatttagcatttatatgttttcccattatattaattaaaaattacgtaattctcaatcagctcttctgatctgtagcttttctgatagtttcaggatgttgtaagtcattcatatggccagaaacaagtgtgaggaatggagggaccagggacaaagctagaggagtgagccaggttataagcactttctaaatagggaattattctataagacagtggaaagtcaccaaaagattttaaatcaggaaagacacaataagatttctatgattgaagctctctctaggagcaatgtaaaaaatacattggctgaaccaagaaagtggcaatgaagatggaaagaaacagatttgaaagatatgtagatcatagattgaataagacttagggaatcatttgagtgagagaatgagggttgaggacaagagaatagtgtttggtggcatcagatttagggcaggaacatagcgaagtaaggtcataatgggttccaaagaagcagtctatcacagagaagaggctagcaccataggacacagggcatatacatctgcagggaaatgtataagccagggcataaattcatttattcaaatatcaatgccactgacattgatcagatgctagctataagagaaaccatcccttcctttgagaaactgactccttagggaaccagatgtaaagaaacaaacatcaatacagtctattataataaaagtataaacaaagttcattttggtatattttcttcaggtcatatttattgcacatacaatattttcttaaacagtttactttgttggcttctctgaagatcatgcattcttttccccctttaggactggtcgcaaattatcagtcatgctttggatttggctcatggtcatatttctttggctcagtgttttgaaaataagaagaatttattttcaatatattaaaactgagcttttttttatataaattcaggttcccaggtcctcttgaaaactgaaagatctggcaataatgttcccatatggcaattcctgattgaagctgaatagtgactcccttagaccgcccaatttccatgggtgctatgaatcatgtggcccatcaggactctctctaagcaccagctctgggaagatcagagccaaatcttccataagtagtgtgtgtcagagctgtacatgtgttaaatgtatagaaaaaagaatgaaacacatatttaatgtataggaaagagaatggaaagaaatgtgttaatgttttatcagcaacatcttaggtttgtttcccaaaagcagaccctgagatgagaattcatgtgcaagggattaactagataagtggttcctggaaaaattagtcagggatcggggaagcaggacaggcaaggggagaagccaagaaagggtggcatgtcagtaccatggagagtagcttcagtctcctctcacaggacaaccctggagtgggaggtgcacctgccaggattttgtactcctttgagtattatctgcccagttacttccacctctctgcacatttgcacaaagcagctctgataactagtgggcagtcttccagaatcccagatgctgggggttagaagcaaaaccacactgaagtctatagaggagctccagaaatggaaaaagcgatccaggactctaaagagaggaccaatgtccactacccagtgattatttctgagcagcaagattacatgtgattattatactttttgttacatttttgtaatgttcatattttttctatacacttgaaatatgattttgtaactagaataaagactaaaaagataaaccatcccttgaccatgtatcttcctctaggcacaactctttcttctgttcttatttgctaagcttcccttaaaagaacattcaagataaatttaatttactgtctcattctaaaagcaatacatatttattgtagaaaagagaaagtacagatgagtaaaaagtaaaaaataaaaccctcgaatcccaccacacagagataaccactgtaatcaccttcaagtatatagttctaggtgtgtgcgtcaaataaaaatgagatagtactataaatacttgcttttaaaaatatttaaataaggctgtgcgcggtcgcttatgcctgtaatcccagcactttggaaggctgaggcaggcagattacttgaggtcagaagtttgagaccagtctaaccaacatggtgaaaccccgtctctactaaaaatacaaaaattagctgggtgtggtggcacatggctgtcgtcccaactactcgggaggctgaggcatgagaatcacttgaacccaggaggtaaaggttgcagtgagccaagatcgcgccactgcactacagcctgggtgacaaagagagaccatctcaaaaaaaaaaaaattaaattaacttttaaattttagaatagttttatatttacagaaaagttggaaagatagtacagagagtttctgtatgcctctcacccagtttaatacatgcctttttttcatttcattcatttattcattcatcattcatttattcaattcattcatttcatttcatttcatttaagttgtcatgcacactttcccatgccaataaatattcatctccacaccatttttaataatgggtattcaattgtagagatatagcataatctcattttgttggatatttggaatatttctaattttgtactattaaaattttttaatttgtaatttttaatattttttgtgtgtgaattaattctcctgagaaaattttttacttttataggtgtttctcaccaaaagtttctaggggtagaattgcttggtcaaatgcaaaaaaaatccttaaggcccctaataccagttgatcattgccttccaggagaacatgctttgcagaatatgagagttttcatttcacccacttaaattttactattcttttaatcccatggataacatgagtcatgtggccaatcaggactttctctaagcaccagctggtataccaactgatatcatttggctgtgtccctacccaaatctcatcctgaattgtagctctaataattcccatgagttatgggagggacctggtgggagataattgaatcatgggggtggttcccccatactgttctcatggtattgaatgagtctcacaagatctgttggttttttaaggggtttccccttttgcttggctctcattctttcttgcctgccaccatgtaagatgtgcctttcaccttctgccatgatggtgaggcctcccagccacgtgtaactgtgaatttatgaaatctctttttccttataaattacccagtcttgggtatgtctttatcagcagcatgagaacagactaataccagcactctgggtattataatttaagaagtaccatccctttcatcccactgctatgatctttgtctaaatcacggccatctctggcagagcccacctcctcctctctgggctccctatctctaatccttgctacctattctgcacaatgcctccagtgtgagtgtttaataacacagacatgagcatgcaagcaccctgcttaagatccttctgtggtcccacactgacttcagaatggtgaccaaacttcctggaatgacatctaaggttgtccccaagtgggttcctccaggctttgctcttcctgtatccctcctacaggtttcctgctatttaggggacacacagctgcttgcattccctaaactcatcatgctgctttctttttccagaagtttctcatgctcttcttccatcctgcctgcctgacatatatattttttttttctttttttttttttgagacagaatctcactctgtcactcaggcttgagtatagtggtgcgatctcagctcactgcaacctctgcctcccaggttcaagagattctcttgcctcagtctcccaagtagctgggattacaggtgcatgccaccatacccggataatttttgtatttttagtagacatggggttttgcatgttgaccaggctggtcttgaactcctgacctcagatgatccacccgccttggcctctcaaagtgctggattataggcgtgaaccactgtgcctggccctgtgtgacattattaagaagtgtcttacccagttttttaagactcacttcaagcattaccttctctaggaagcctttacggactctttttccctccttccccagcctcctacctggcctaacggctttcccttttgtgcctaactctggaggccaacttagtcaaggtcgagtctcattctccagttaactgacattttaaaaatgtgccataggtccctaaggtggtaactaaggggaggacaggtatccagttatgtgtctactgcaatgatcccggcaacaaactgttgtggatgggatgagagaagagggattgattctggacatatgaaggagatgaaatcacagggcttgggtgcccaaggtgagaggagtgagagtgagtgaaaggaaggctgtaggaagagtcctggttcctgttggtgattgacgatgcataatggtttcctagcaccattgttttttgtcttcccatcagatcaccaacaccccaagatcttaatttcccaaagcactaagcacagtgttaaatattcaataggtcctcagtgatcccctgtggctcatacacaccgtggctttaaattcaactcagaagtagctccagggcagtgcagtggctcatgcctataatcctggcactttgagaggctggggtgggccaactgcttaagctcaggagtttgagaccagcctgggcaacatagtgaaaccccgtctctacaaaaattacaaaaattagccgagtgtggtggcacacacctgtagtcccagctacttggggggtgagagtggggatgggggctgaagtaggataattacttgaacctgggaggttgaggctgccacaagccatgattttgccactgcactccagcctgggtgacagagtgagaccttgtctcaatttaaaaaaaagaaaagaaaagaaaagaagtagcaccaaacaccatgctaggctcctcattgacctacagaattttatgttgtgccaatgtcattgatttgtagggtacacctagtaagtattaacatggagttaatatggagttgttaaaaagcctagaagtttatagaatattttagtggtgtggatggtgcctctcctacttttatctgccagggcatgggtatttgaacttttctgactgccgtgcatggtaaggaatacattttacagggcagagcccacgctgttggtgctccatctgtatgccctgggtctaccccgaagtcactgtaggcagctcctttgcactcctatggatgacccagccctctcaaggacattctctggccatgggggcacacttggtccctatgaggcgcatcctaggaactaatgcccagctgagactccaaccaacagaggacgggtgttatggctgatgctccacttcctcatcttaggtagggacagctctgaggcacggtccacagggtccctccaagagtctccatgagattgagctccagggtcccaaagcaggagcccggtcataaacaagtgcttcactgacttttctctttcgttgcctcctttcttccattccctcgcagtacattctagaatgacctcccccacaataacccatttgccctcaaacctttatctcaaacaataggatgactacagtcaatgataacttaattgtttatttaaaaataacttaaagaatgtaattggaggtcgggcatggtggctcacacctgtaatcccagcactttgggaggccgaggctggtggatcacaaggtcaggagttcaagaccatctggccaacatggtgaaaccctgtctctactaaaaatacaaaaattagctgggcatggtggtgcacacctgcaattccagctactcaggaggctaaggcagcagaatcgcttgaatagggacccaggaggtggaggttgcagtgagctgagattgcaccacaggactccaacctgggctacagagtgagactccgtctcaaaaaagaaaaaaaaagaatgtaattggattgtttgtaactcaacagataaatgcttgaggggatggataccccattctccatgatgtgcttatttcacattgcatgcctgtatcaaaacatctcatgtaccccataaatatacacacctactatgtacccacacaaattttaaaaaataaactctttatctcagggtctctttgtgggtaaaggggcagtgaagacatttggtgatccaatgtactcatatctgttttttgtttgtttgtttgttttctttttggagatgaggtctctctgtgctgcccaggctggtctcaactcctgacctcaagcaatcctcccccatctccctccagagtagctgggattacaaacgtgagccactgtgcctggctgcatactcgtaagtgaaacaaaagtttcgagaatgcttatcctaatatatcaaatgcgctgatcttttcccttcccttcccttcccttcccttcccttcccttcccttcccttcccttcccttcccttcccttcctttcccttttctgctgtacgagacctactgaactaatttgatgaccccctcatgagtctcagcctgtagtttggagatcaccattccagagggtgggtgtattaaggagaactgggtcttgatcataagcctaatttaatagtcaaactgctccttgggaggcactgcgagccctgaggtcagctgggagggtttctagtggctcatggatgcctccatttcattgcatttcaaactgatgcttcttgtcaaggggctactttattggctttgctgaccattttggcacaaagcccagtagaaacaatgtcccccttttctctgaatagttcttcgggtcacctcagagaagaccagggctcggaattgagggtggagagagcaattaggaaggaggaggagaagtggatgtggattttcaaaggtcaggcagagtacaattagtgaactcttagacttattccaagtgcctttcctggctggaaaaacaacaataaaagaaagaaagaaaaaaaaaaatccaaacccacaagtggggtaaaagttgaagaacactttaattcataaggaaaagggcttgaataattgatgctgccgccatgccaaagataatttcagcgctctctctatctcacaaagacatttagcattgattgagatcaaagtatcagggatccctgctgctaggctgaaaggcaaaactcacagcggcctttctctgctctgataatgtcgtctttatgtagttaataaactgcacacaccagtcaaactatatcattacagaagacttagggagctaataatttaaaagcaaagaattgcctctgttcttcactttgaactaaacaacattctgttgaaggaggaggacatcaaagtcttgtcactattaccagtgtggattgagcagaaggccgcacagagagggcacttcagtcatcaaggaaaaaaaaaagagaaagaaagagaaagattaaagatattggcttatcaacccaaaggcagtaccaggtgttttattattatttttttcaacaatgtaataagcatcaggtggctagctcatcagtgagtgtccttgttaagtggatgtacatgaaccaggtcacagactgttccctttccaccttggccccattctgaactttgtccttaactacctttatgttcactttcagcttgaccacccctcttgccaccccacccctggcctcccttagcctccaggggttctgttttggtgccttccacgacctctctttgtgaagagcagtagagctccacatctcccacccctcagcattggcttgtctgtattttgcctctgagactccactggcttgctggaagaggtggagatgcaaccatttgaacaggggttttctgagatcgaaactccattccaccagttttaaagagtgacactgcataaagcacataaggcttcttcctgaccatcctcacacactgctcttggaagcattcttagaatggattcgctagaagcagggattctcatacaagtgatttatggagggaggctcttggaagaaaatcctttaaggaagcgatggaaacagggtagggaagaggaagaagagaagatgtggctcagctgaagtctcatcttagcctgttcccagggggagctggaaagtatgaaaggcaacacaaggtggtccccacttctggcctttgtaccctgtatcagtcacctgttagctgcagctgcctcagggtagtaggctgacattccagacacttcctgcctcagtggctcctgcaacaggccaagggcagttctccgggtagcagccaggtggcttttgcatcaacactgacagcagctgggagacggaggcatcatcctgtcataggggctttgggcaggtcactatggagggtcaatccagtgatttaccagaagactgtagaaaatgttcttgtcgtttaatctagccgctttgtgtttaggtctttatcctgaggattatatcacgaatttgtgagaagttttgttgttgtcatcatcaacataaccaccgtcatcatcctctgttgagcgtgtatttgcagagcactttacagatactgtctcatttaatcctttcaaccattctgtgaggtttagagagagaattactcttgccttcgaatgcagggcttgacagtggcatgttcaggggatattcattgcaatataatttacagtaataaagatttggaaagaatccatttctccaacactgggtgcagagaggtaaattacttacctctgtagaatggcataatgcgtagaccataaaaatgctataataatacagaggtgagtccacaatacactgctaagtggaaaaattaggccacaaagctgcattataccggtgcgtgcgtgtgtgtgtgtatgtgtgtgtatgtgtgtgtgtgtgtgtgtgtgtgtgtgtagacaatatgttttaaatattaagggatatttttgtgtccacatttccttttaccctttgtggaacctcctccctacccccatcctctgtattaaagttcagctctttggtgctgtttgcctcagggaagggaaataaaatagtaggcagtggaaaagttggaggagtaagaagagggggaggagctggaagcaaggcgagacgacctggtcctgggatctagcatccatccatggaccacatccccttgccccccattttctcccaatcctattccaagaggggagattgaactggagattttgaatttctgcctgcaggaatcaagaatcacaacagaaatcaagctgagctagaggaaataaagatctatttcttgcctacataaagctttggatggggatttacacccactgcttgtgaacaggaaaagagtaaaaggaaataccacaaaatgatgattcagtggttatcactgagtgatttgtatttccttcttggtgctttcctgtgtgtttcgtgttttttttttttcagtaaaacattaattttgaagtcagaaaaaagttttttcaaaaaatttagagagtactttattagtttctgtgatcaaactcatgtagataagactttacatatttaatacagtgtgttacccttgtacaaatggaaaaaaaataagtttaacttttctagagcaatatggttgttaatttctgtacaatgccacctcaacatggtaaactggaatatttttccaaagtggatagcacagctaaagtttccaaaaattcaaattatatgtagaccaataatagcagtatgttatgcattaatagcagcaacagcttaggaaaaagttatatttaaaatctttctcttaaagggaatactcatacacagttgggaatgtaaatgcattcagctactgtggaaaacagtttggagatttctcagagaacttaaaacagaactaccattcaactcagcaatcccattactggatatatacccaaaggaaaataaatcgttttaccagaaagacacgcacactcatatgttcatcacagcactattcatcacagcaaagacatggagtcaacccagatgcccatcagcagtggattgggtaaagaaaatgtggtacatacacaccacagaatactatgtagccataaaaaagaatgaaatcatgtcctttgcagcaacatggatgcagctggaggccattatcctaagtgaattaacacgggaacagaaaaccaaataccacatgttctcacttgtaagtgggagttaagcattgggtacatatggacataaaataggaacaatagacactgggaaccactagatgggggagagagggagggaaaaaagagctgaaaaactacctattgtggactatgctcactaacctctgcatcacacaatataaccatgtaacaaattagcacatgctctgaatctaaaacaaaggttgaaattattaaaaaaaaatctttctcctccttctcctccaacaacaagaagaagaacaacaacaataccagcttatatttattaaggaagcttaatatgtcaagcatggggctggccacttcatattaccccattcattcctcccaactcccctatggggtaggtactatcattcttgcattttacagataggaaatttgaggctcggagaagtcaagcagcttacccaaagtggcagaaatgtggtaatagtccaggtctatctgaattcaaatcctatgccctttccagctctctctattgtccatctggggaactttttctgctatacgcaaaattagccaaggcatctggggatggggttagagactgcaagagagcccaggtgctgagcagtgctagccttgccgataaacagaagagcccataaaaagggccagcatggggcctgggacacaactctctgtatagtgaaaaagaaacatttgccatgatgaattatgttgatgcaataatgaaaggataatttttggaagaactgaactgttattaagagacaaaggcacatgaatcacatcaacattgatctacttagtattacttctgaactaggcagtattttttttttgtttttgagacatggtctcactctgtcacccaggctagagtgcaacgatgtgatcacagctcactgcagcctcaacctctggtgctcaagcgatcatcccacctcaacctcccgagtagttgcgactacaggtgtgtgccaccacactgggatcgtttcttgattttttgcagggaaaggatctcactttgttgcccaggctggttttgaactcatgagcacaagtgatcctcctgcctcggcctcccaaagtgctgggattataggcctgagccatcatgtctggcagtagtattttttcaaggtacatttccattgaagtttgacagagaagagcacacagaaaaccaggatacagcgtaatgaattttcacaaagtgaacacactcatgtaaccagctcccaatcaagaaaccggcattccaagaaacccagaagttctctcatgccctgggccagttactttcccctcaataaaggtaaaaactatggtatgttaatgagatttatccctgatgtttatgtgaagtttgttcatgcccattgacatatagcttttcacatatttatcctgtgtgagtatatacagtagaatttgcccattcttcaacccattcattatttacctattcatcatttacccagtcatcaacaatcaatgctgattggcattcattgtttcttttttatttttttgtgttgtttggtaaacttacatatgcatttcttttgggcatatacctaagggcagaatcgctctgtcacagggtatatgtatgttttactttggtagatgccaaaaaaaagatttccaaaataattgtatcaagttacatccagctacaagtgtgtaagaatttccagtttctttacacttttgccaacacttggttttctattttggtgggtgtactatggcatgtcattgccttcgtaaagttaagtacttgaatactttttcatgggtttatttgccaattggatattcattttctgaagtcctgttcacatcttctgtatagagtaattaaagaataattactatagtcctttgtaaatggtagaattctgctccttactgttggtcttgttggacattgtggttcgtgtgatgtagtttttgatgttttcttgctcaaaagtacatgtacccattagacttttcactgatgcataaaatgtctatgtcacagtttctattgattaagacattagctgcctacccaaaaaagtgtagatgttagagagagaacagagtgtagtgtatgataggttcttttaagttgtgtggaacaagggcatattatgatatgggtatacaggaaacccagagagacaggaaatgtctcagtagcctcatagtcaagctccacaaagaactggaacatctcataacatgagtactggtattttaacagcaacttcagtcacctaacagagtgacctggccatatgcttgccttctgagaagaaggtgtcatttatcagctgcatggccagtggactcctgctgttattgacaaaggagtactagattttctttcttcccacttcccagattctgccacattaaggcttccatagtctcagagtttctatagcatctgcataatatcttctctccatgtgtctttccatggcttctcctactccactaatatctctctttctctgcaggcctcacttttgagtgaagaatctgattggacagccattgtaggacactttatgaacagagctcttgcaccaaaccacttagagggccactggccagccaagatggttgcttcatgtcagccagctgtgtcagcttcacatgtgctatggattgcatgtctgtcctctccaaacctcatgttgaaatttgatccccagtgttaaaggtagggctgagtaggaggtgtttgggtcatgggtgcagatccctcatacatagattaatgccctccctgggggagggggagtgagtccttgctcttttagttcccatgagagctggttgttaaaaagctgacaactctcccctctctcttgcttcctctctcaccatatgatctgttcatacaccaggtcccatttgccttttgtcattagtagaagtagcctgaggcattcactagaggcagatgcccacttttgaactttacagccatcagaatcacaagccaaataaacagcttttctttatgaattactcggtttcaggtactcctttatagcacacaaaatggactaatattttgttcatttcattttagagaggagaatattgaatgccagaacatttcagtggcttctgtaatttatattctataaatggtagagctgggatttgaactcatccctattttattcatttattcattcatgccataaattattttatttatttttagttgacaaataaaactatacatatttttggtgtataaaattatattttgaaacacgtatacattgtggaatggctgaattgagttaattaacatattatttcacgcattttttctatagtgagaacacctaaaacctacaatatatttttattaactatcatcaccatgttatacaatagatctcctgaaattattcctcctatccaactgaaattttgtaccctttgaccaatatctcccaaattccccttaatccccagcccctgtaaattacaattcttttctttgtttctatgaatttgatttttcagattccatatacaagtgagatcatgcactatttgtctttctgtgcctgacttatttcactaagcataatgtcctccaggttctttcatgttgttacaaatggcagaattcccttctttttaaaggctgaatagtatctcattgtgaaaatggacattttctttgtccattcatccattgatgaacacttacgttgattccatatcttggctattgtgactaatgctgcagtgaatatgggagagcagacatatttttgacacactgatctgatttcctttgtaggtatacccagtagggggattgctggatcatatagtagttctattcttaatttcttttgggacttccatactgttttccataatgactgagctaacttacattgcttcccttttctccacattttcaccaacacttgttatcttttgtctttttgataatagccattttaacaaatatgaggcagtatctcattgtatttctctgattattagtgatgttgagcatttttcaaatacctgttggccatttggatgtcttcttttgataaatatttattcaggccctctatattttttagttgggttatttattttcttgttattgagtcgtttgcattccttatagattttgaatattaaccccttatcagatgtatagtttgcaattttctcccattctgcaggttgtctctacactctattgattgtttccttggccgtgcagaaattttttagtctgatgtaaccccatttgtctatttttgcatttgttgccagtgctttggggtcacatcaaaaaaatcatcgtctagacccatgttatgaacctttcccttgtgctttcttttagtcattttactatttgaagtcttttgtttaagtctttaattcattttgagttgatttttgtatatggtatgagataaaagtctaactttcttcttctgcatgtagatatctagtttcccagtgacatttattgaagacattgtcctttcgctgttgtgtgttcttgacacctttgtcaaaaatcaaatgacaacatatgtatggatttatttctgggctctctattctgttctattggtctatgtgtctcttttcatgccagtatcatgctgttttgattactgtagctttatagtagatttcaaaatcatatagtatggtgcctccagtttttttaaattttgttttgttttggagttttttgcccaagattactttggctacttgagctcttttgtgattccatatggagtttaggattttttttctatttctgagaaaaatatcattagaattttgatagagattgcactgaatctgtagatcactttgggtagtatgcacattttaccaattttaagtctcccagttcattggcacagactattttccatttatttgtgtcttcttcagtttatttcatcgatgtatatagttttcagtgaacagatctttcatgtccttggtttaatttacttttaagtagttatggcttttatgaaggtaaatgtgtcctaaggagatgtggagaaaaacatagttgtagcctgtggcagaatatgcaggtcagggtggtggtcaggtagaatctttacgttctttatgtctctccttgtggaaatacagccctccctttccattcagccaccaccacaaatctggcctgaccaatcagagtatttattctaattttctagtcactgtgattggttcgggaataggcacctgatccaagccaggcctgtaagagttagccttgggactttagctagaactactgggaaagactcttacttttttcacgatgatcattgcctgtaaagacaagtaaacttggagctacttggtgtgcagtatcttttaaggctccatgtttaagaaccttggagaatgaagccaaactaaggaaagcaaaactgaaaaatgaagagagagtaagatttttgaccgcattgtttatggacctgatttcagctacatatagtggcaaatttacctttggatttttgatgtatacgtaccaacacatctcctatggggctgaagtcagattgagttagtttcttgcccttgcaattaaaaaatgttctgattcatgtagtcaacttcctacataaatattaacatggagaaattgaatcagaagtttgcaatgttctccttggaaaaagatttcaaggttccaaggatatgaaatcatcatgtaaaatagctgttcctccttcagaagagatgaatctgaagcaaggctgggcctgaaagaaatgacctatagctaagtgagacttgtgtgggtcaggaaagaagggacacatttttgcttctgctgtgacactcgcttctggtcatttttattatgatagtgtctaagtccattcattctgctgtgacagaacaccataaagtaggtagcttataaacaacaatttatttctcacaatcctggagcctgggaagttcaagatcaaggcactgacggaattggtgtctggggatggtctactttctggttcatagatagcaccttctagctgtgttctcacgtgttggaagggggaaggcagctttctagggcctatatatatagaattagtgcctatatatatgaatagtgaatagaattagtgtctacatatgtatacatatagacactaattctattcactaatatatagacactaattctattcacaacagctcttcccttatgagctaataacccctaaggctccacttactaatacacattggtgattaggtttcaacatatgaattctgggggagacataaacatttagattatagcagatatagaattctgggcagggtagaaaacatttgttagtccggtagagtttccatccatccatctatccaaccatccatctgtctgtctctatctttgcccactaattaaacaaatatctgttgagtttaaataagcgccagatacaggacttctgagagagaagatttgaagcactaggtcaaggtcaaactagcaagacacttcctctcctggaggccagggttcagccagatgtcctctttttcatctgcaaaataagaagatctaacctagatacttgctcatgtctctcccagtgctattacttgatgattcaaacaattttcaaggcctggcatggtggctcacacctgtaatcccagcactttaggaggtcaaggtgggcggatcacgaggtcaagagatggagaccatcctggccaacacggtgaaaccccctctctactaaaaatacaaaaattagctgggtgtggtggcacgtgcctgtagtcccagctactcgggaggctgaggcaagagaatcgctggaacacagaggtggacactgcagtgagccgagatcacaccactgcactccagcctggcaacagagcaagactctgtctcaaaataaaacaaaaagcaattttcaaaagggctgataccttagagtgttatctggttcaattttctcatgtctgggatgagaaaatctaaacctggggagcttgagggatttgatctgaagtccacttcactctcctggtgatgatgactcagtgatgctgtgatgactggtggacaaggacagaagaggctgtaggcagaacgcatagattccaggacagcaggttcagcaaagaccagcggtagctggtatggtggctacctcaaagggctggctcaacccaggcacggaaagtggaaaagattggggtatagggacagaaaagctgccccgtggttttctttctttctttcttttctcaacgattgaaacccagcacataactgtgtgggcattgagagaaaacaggcccagctgcctagcagtggccccaggagcctgtgaaacgtctgctcccaccaggctcacggagggcgccaggatgctctgcccaatggctgtttccttgacttctctcttccaaaaaggaaattgcaggcatgttactgctttgctcaggaccggggattatggagcttaaactctctcctccaagccatgttcaagtttttgacttaaaagggaaatgtttcattttaggccaaatgcatccccctctttcccccttcctggaacgagaacaaagcaattcaaatcagaaaacagggggaactccatgcgccctgtccacggggacccggctcccaactggatcccacggaatttgattgaagtgcaactgaacccctccgcgtttgttcaaatgtcatttaaatagaaacgtttcaaatctctgccaaggaactgcccagggggtggcatggaacggagtcaggccctcactgctctgcgggctgcggcgggcccagaccacaggggcgggacccaggcgaggctgactgaaacccagcacgagggaaaaacaaagtggtgggaaaagaggggagaggggaaagaggagggacagaaaggggacagaggtggactctctgggcagtttttacactaaagatacaagatataaatgagacacaagatgtctgcattttggcatgttttctaaaaaaaaaaactttaatatgtttaagatagagacaaactctcaaagcctgaaaggattcatgatcaggattgcagtgagccttcaagattttggctgtcaccctctttggtctcatgacgattcaaacgtgcatgcatcatcgcaacagtttttagcttcccagtttggaaagaggacaacaatgtttgacctgcctggcctttgtcagggctgctgggtaagatttgccttgaggtttggggctgagggtgtgggtcttagtttccttaccccactcgataaaggcagccataaggtcaagggtttgagatactgttggtacccaggactggaaatcggcaagcattgccgtggtgtactctgggggtgcccaagaggaggaggctggactttcatcctccactcagctgtaatgactactctttgatttgttttacgttttgagttctgggtaaaattttgtggcaaaaagaaatctgccactagcagcattgtttagaagcacttaagtagacatttcaaaagatccatggttctgacattctacgagatcaaaattggggagagattgtagtgagggtcgttcctccatccctgaggacccattaccatgggatagagttaatttgctacattaagacctccttcctggccgggcgtggtggctcatgcctgtaatcccagcactttaagaggccttggcgggcaaatcacctgaggtgaggagttcaagaccagcctgaccaacatggagaaaccccatctctactaaaaatacaaaaatagctgggcatggtggcacatgccagtaataccagctactcgggaggctgaggcaggagaattgcttgaacccaagaggcagaggttgtggtgagccaagatcacactattgcactccagcctgggcaacaagggcaacaagagcgaaactctgtctcaaaaaaaaaaaaaaaaaaaaaaaaaaggtcttccttcctggccgggcccagtggctcaggcctgaaatccagcactttgggaggccaaggtgaatggatcacctgaggtcaggagttcgagaccagcctggtcaacatggtgaaactccgtctctactaaaaatataaaaattagccaggcatggtggtgcatgcctgtaatcccagctactcgggaggctgaggcgggaaaattgcttgaatccaggaggcagaggttgcagtgagctgagattgtgccattgcattccagcctggctgctgggaaaaccatgtcgtcaggacactagaacttgagaaggattcacatgggcctggatctagcagactggtgagtgacttaggacttatgaaaccccaagaaaactcagtattggtgacgctataatatgagccccctctgaattgaaataacctgaagatgtacaagaagtgcagctcaagagttgctgatggtgaaatctcccctccctcatagacatttactcttttatcttagagagcctcataaagcagcaggatatagtcaagcaaggtgcatcccctttcatcactatgttcagccaagaagtagctctgagactgaaactgcctttgcaaaattataactagtaactgagacagtgaaagagatttaacctaactgactccatcttgcttctaacctttaagctgtccttgctccttcctgggtgtaggttgaactaacttcgggaggaacttaatttacacttatagttttaaaaaaataaaaaataaaaaaataaacctccttcttgcctggggactcaactgcctttgcaggactaacaaatttagctacaaggttagaaattatggtttaggagtcatgcagctggaggctacaagatctggactctccctaaactgctcctaagatcagtgcctgagacattttgcagaccttgcacttgatggatcaggtggcaccacccagatggataaactggctcatctgctcttgtggcccccacccaggaatggactcagcgcaacaggacagcttcaattctcggtgatttttatctcctacctaaccaatcagcactcctcgctcactggcttccccccacacaccaggttgtccttaaaaccctgatcccctcatcaggagatgcttgggaagactgatttgagtaataataaaactctggtttcccacacagccggctatgtgtgaattactctttctctgttgcaattgccctgtcttgataaatcggctctgtctaggcagcgggcaaagtgaacccatggtacagttacaagacacccctttcaagaggaacaccaagggaaggtgatggctcatgcacgagcaaagacccgagatgcgacggagcccttcattcactaaaacttggctacttactgaaaccatagaccttcagaactaaaagggacctaagaatcatctccttttacagatgagaaaactgaggcccacatctatgaatattcatacataattaattacttcattatttagtgatctaatttggcatacttgtaccttcataaccttcatcaattttcagtgactttggttaaaaatcacaaaagaggttgggcgcggtggctcatgcctgtaatcctagcactttgggaggccgaggcaggtggatcacttgaggtcaggagttcgagaccagcctggccaacatggagaaacactgtctctcctaaaaagacaaaaaatagccaggcgtggtggtgggcacctgtaatcccaacaactcaggaggctgagacaggagaattgcttgaacctgggaggcggaggttgcagtgagccgagatcgtgccactgcactccggcctgggcgacagagcaagactccatctcaaaaaaaaaaaaaaatcacaaaagccatgccatttaatttcaagatggtatgcttaacccctaatcaaacttactgtgcatcttgacactcttagtcatagattaaatttgatgcaaatcagctcattcctttgcaagtggctatggaataagataggcaaatataaaatgctcctttattgcacagatttggatagaaaactgtgtcattttgctgtcattgtaaggtcacagccatattggcttttatcagtcagtataagacaattggcctgaagaacagaccgttgtcctgttcccattatcagtgtgctaagacagttcccttatctgcccacagcttttcttcccttcccttttcaaagacaaaatgccatggggtcaaaatccctgctttcctttttacaggaattgacaagctggtccaataattcctatggaaatgcgagggacccagaatggccaaaacaattttgaaaaagaaaaacaaatgtggaaggctcacactttcccaatttcaaagctgtagtaatcaagactgtgtgatacgggcacaaggacagatctatggatcgttggaatagaattgagaacccagaaataaacccaattcaactgattttagacaaagacgccaagacaattcaatgggggaaggaatagtcttttaaacaaatggtggggtcaactggatttccatatgcaaaagaatgaggatggactctgacctcacacaccatatacaaaaattaactcaaagtggattaaaaccctaaatataagagctaaaacttttagaaaataaacatagatataaatcttcatgaccttgtattaggcaatggtttcttagatatgacatcaaaggtagaaacaaccccaaaaaaagttaaattggactttatcaaaattaagtgcttcagaggacactatctacagaatggaaggaactgtgtatttctaataaatgtctagtatccagaactcttacaacttaaaaaaaaacaaaagaaaaccaaaaactcaatttaaaaaattggcaaagtatttgaatagctatttctccagagaagatgtacaaatggctaatgaggacatgaaaagcggctcaatatcattcgtcattagagaaattcaaacaaaaaccacaatgagagtcctctttgcatccactagggtgactctactcaaaaagatcgataataataagtattggcaaagatggtggagaaattgaaactctcacgcattgctggtgggactgtaaaatggtgtacgaactttggaaaacgatttgtcaattcctcaaaaaggtaaacatggagttactcgaagacccagcattttcttatatatactttcttattttattttatatatatatacttattatatactttcataagtatatacccaagagaatggaaaacaaatgactgaacaaccacttgtacacaaatgtttatagcagcattattcttttttttttttacttttgagacagagtctcgttgtgtcaccaggccggagtgcagtggtgcgatctcggctcactgcaagctctgcctcccaggttcaagtgattctcctgcttcagcctcccaagcagctgggactacaggcatgcgccaccacacccagctaatttttgtatttttagtagagatgagatttcaccacgttggccagaattgtcttgatctcttgacccgtgatccgcctgcctcggcctcccaaagtgctgggattaccggcatgagccaccgcacctggcctatagcagcattattctttttgtttttttttttttttgagatggagtctcactctgtcgccgaggctggagtgcagtggcgcaatctcggctcacggtaagctccgcctcccggatgcacgccattctcctgcctcagcctcccgagtagctgggactgcaggcgcctgccaccccgcccggctaatttttttgtatttttagtagagatggggtttcaccatgttagccaggatggtctcaatctcctgacctcatgatccgcccgcctcggcctcccaaagtgctgggattaccggcatgagccaccgcacccggcctatagcagcattattcttaatgccccaaagctagaaacaaccaaaacattcatcaaacattattcatttttatgaataaacaaaatgtagtatatcgtacattatgctaagtgaaagaagccagacatattcaggccacatattgtatgattccatttatagaaaatatccagaataggcaaatccgtggggacagaaagtagactggtggtttccaaggactggggattggggatggggttgagagtgactgctaatgggtatgggatttcttttagggatgacacaaatattctgaaattatatagtggtgatggttgcacaactttgtgagtatactaaaaaccactgagtcacacacttttaacgggtgaattcgatggtatgtaaattatgtcaatttttaggaaagaccatggaaattaatttgggggatagtttaagcatgctaacggggactaatgagagcttaggaggcatcgaggctcatttctcttggttcactctaggatttttcttaatcatcaaatgtaggtggtacaggcaagaggttacttgtccatcacatcattggcccaaactggtgtcatttctttccttgctacaaaactttcaagcagtcaatggatatcttatattctcctatacgtgtaggtggcttagtacagaagaaaggatatgagcttcagaggccagcagtgttgtgttgaattttggttctgtcctttgctcattgggagacctcaggcaagttacccagccccctggacctcaatttcctcatttataacattggttggtgggaagactcaatgtcaagtttcaggcacatggtgcacacccagtccatgttagtgccttgctttttccttttccttatcttcccagggtggtgagagctcggtgtttatacacaagacagcataggtagaggaagtctggttaaaggggcaaattgcatccccttcactccttcactccttcactcaagttaaataacaggaggggaaactgatcacagccaaatctctcaggtgtagattttgtctgagggcaacttccatgagccgtacaagaatgcagctgagcagtaagaatcagagctggttgaattttctaagccaggtaactacaatgagtttccaggtacccaagcttctgctgcttcctcacctcccctagaataatttggatagcttgccagacttgtaggtatctgaaccattgcaaggtgtcacctgacttcccttagtgacctccctggcaccccatccttatcatcagagagagccctcagcaggggcagaaactgagtcagacgcttcttccagaagccagtccttctctcatcgccctccccccaacctcctctaacccacaagctggctttcatttcccctctctctcaagctgcgaagagtatctcttcctaacacttgtcaaaaattaaagcgagacctgctttcaaatgttctgtctgtactcgccggccaggaaggcgagtctgtctccaaagaatttgcatttacaattccaaatatgcactcgtgctaagacgaaagaatgtctgttcgctttcaagctgggtttggcatgacctctaggttttaatattttcaacaaagtgtcatttgacaattcaaccacatttagaaagaagagaaaagtgaatgtcctctcatacacgtgccgactggattgagagtcagatgagaagacttagcccagagccatcgactttattttatcttttgctttcacccgttatttaattttttaaaatctccacagaaacacaatcattttcatttctaggtcttaacttctgttttggttacgagggtcaacatgaggcttcctaagaagaccagggaatctgcatttcctgatgcaaaagcattaagccaagtggttttccctgtctgtctccatgtcttgcatccaacccagcctccctaccttccccatcctagctccaacaggaaggggatctaatcacagccaaatctcccaggtgtagattttgtcagagggcaataccccataaatgctacaagacttccggggactctgttctttgcccccaagcaatggtgaatagtggcttccaaaggcccccttggagtctcaggtcatcccgcaggcagggagcccagttgtgatgggtgcagtcccttgagaggccaggaggagggtgtcttgtccttcagaagtcctgttatgggccgcggtccccctagcacggaaggctctgtcctgatgaatgtgtggaattggctccacgactcagcctgcagatctgcttgtcacaataatcaatgacgcctcaggctgtgccacccagctccgttttacttagaagtcggtggaacagtgggattcctcatgatggcttcattcagcactccagcaggcctgtgggcacaggacgggggtaggtttacacagatgctagcctctctggcaccctagcaggtgtctgctaacctccctcagaccaccctcacagtaaagagcccctctcgggtttgagatatgagagaccagtctctggagtggccttgggggaagggatctgcttcctgcctattgtccacggtttggctggtgggtgaggacttgtgtccacgtgggaggatgataacacagggtccagctttggcagagcacgtgggtgcttcatgcaacactgcattgattagtcctggccgccccaagtggtattatatgcccatttagccacgaggaaacaggctccgatcaatggcgtgccctgccagaggtcacaaaaccagtaggtcacagacccgggtcctgatcagcagccttttgcccatgcttggactgctgcaccacctgtaaaaacagatcggccccttggaggctgaagaaatagccagccaccatcagattctttaaacttatagaagccttttcacagccaggcgcagtggctcacgcctgtaatcccagcactttgggaggccgaggcaggtggatcatgaggtcaggagatcgagaccatcctggctaacacggtgaaacctcgtctctactaaaaatacaaaacattagccgggcgtcgtggcgggcgcctgtagtcccagctactcaggaggctgaggcaggagagtggtgtgaaccggggagttggaacttgcagtgagccaagatcccgccactgcactccaacctgggtgacagagtgagacactgtctcagaaaaaaaaaaaaaagccttttcacatctacttctggtatcttttttgcttctcccaacagaccccctgctggtgtgattggtgggggatgccagacttggagctgatatcttccctcaagagatcctgcaactgtgtcgggcaaccttacagcccaggaaggtgcaggcagccaccctcccaccttgatacctcctgggcttaatggcctttatttgcactgtgaactgatgggactcacctgtaccagagaggaatgcaattgagtgacatcctccaagcacctggaaaggccaccacttagtgccatatttgcagtgcttcccagcaacgtccacctgtgtgtccttaacagcggaggcgagggaggatgtctgaaaattctttgaagtgttatattttatctaaaaaaaaaaaaaagtttgtgaggccaggtgcaatggctcatgcctgtaatcccagcacttcgggaggctggggtgggtggatcgcttgaggccaggagttcaagaccagcctggccaaaatggcgaaaccctgcctcaggtagaaatacagaaattagcccggcgctgtggcgggcgcttgtaatcccagctactcaggaggctgaggcagatgcgtcacttgagcctggaaggtggaggttgcagtgagccaaaatcgcaccactgtactccagcctgggcaacagagcgaaactctgtctcaaaaaaaaaaaaaaaaaaaaaagtttgtggaaaattacattctacttcatcacatatctgtttctttctacttcttttttctaaaaaattatagtaaaatatgcataccataaaatttgcaatcttaaccatttttaagtgtacagttcagtggcgttaagtacattcgcgttgttgtgcaaccatgctgccatccatccgtatggcctataaatcctaaaagatctggctgtgatcagacccccttcctggtggagctgggatggggtatggtagggatgcaaggttgaaggggagagatgaagagagaccggattctttttcacattacaaactgaaactttatacccattaaacattcatttcctgccaggcacggtggctcaagcccatgattccagcactttgggaggctgaggtgggcgaatcgcttgaggccaggagttcgagaccagcttggccagcatggtgaaaccttgtctctactaaaaatacaaaaagtagctgggtgtggtgccacatgcctgtaatcccagctactcgggaggctgaggcaggagaatcgcttgaacccaggaggtggaggttcccgtgagttgagattgcaccactgcacttaagcctgggtgacacagagagacttcgtctcaaaaataataaaactaaaataaaataaaataaaaatgaaaaagattcatccccactccctgctcctcaaccccttgcaacacaattttttctgtctctatgaatttgactgctctaaatacctcatatgagtggaatcatacagtatttgtctttttggtgatatttcactcagtgtaatgttctcaaggttcatctaagttgtaggaatttccttcttttttaagtcggaatttctttcttttttaagactaatatcccattgtacatttgtaccacattttgtttctgtatctgtgtcttttaaataaaatgtcttacattactcaccagttaaatgaggtattcacattataataaggcctgacatgtaaggccaggccctagcaaactttttcttaaaggagcagataataaatatttcaggctttacaggccgtaaggcctccattgcaatcacacaactgtgaaattcttctgttgcagcactaaagccacgacagaccacatgtaaatgaatggatggagctgtattccaataaaactttgtttacaaaaacaggcagtgtgacagatttggcctgtggtgagtggttttcagacccctggtctaggaagtcaatctggtgtatcattaagaacgtaggctttggtgtcaatggaatgagtttttcaattcacacaaaaaaacctttttcttcttcagggttcacatatgtcccagggtacccaactggattactctgcccagaactgccctcacccctgatcttcaggtcctgcgactgaatctgacacactctggtcaaactcctccccaaatgattgattttttttttcttggatgactcacaggtcctccccaacatgaccacccaaagttgaacacatatgcctgcgagtgactgagtgatgattgtgtacaagaaggttgatatggtttggctatgtccccactcaaaatctcatcttgaatttcaattcctgtaatccccacgtatcaggggagagaccaggtggaggtaattgaatcctggggacgatttcccccatactgttctcatgatagtgaattctcaagagatcggatggttttgtgtttggagttcctcctgtattcattctccttcctgccaccttgtgaagaaggtgccttccttcccctttgccttccgccatgattgtaagtttcctgagacttccctagccatgctgaactgtgcatcaactaaacctcttttctttataaattacccaatctcaagtatttccttatagcaatgtgagaatggactaataccaagttttccctgcagcacgtcttcagtcctgacataggcccagatgggtacagacacttggggaattgagtgtcgctactgcagatgctaagagtacccaaaggccagtcctggcccaaataaaaactctgcatcactctgttacagtaaaatctttgtagttgtttgcaaagtgtctattcccatcatggaagggatttttactggggacagttggcactttatcttggcctcccagagattctgactctaaaccgagaatgccaaacgatgtatctgatgcctccaccaatatctcaggaggagaatacgtgagtttgggaaccaggtaggttgtataacctccaaaacaaggtttccaagtggaggctttctcccctgtcttctggacagtcttaagatattttaaaaaattatctaggtataactgacatataataagctgcacataaagcatataatttgatgaattttgacataggtctatagcaataaaaccatcactacaaccaagatagtgaacagatccatctcctgcaaagtttcctcatactccttggtaatccctccctatctctccaacacccttctccccaggtaaccactgatccactttctattagtttgcattgtttggagttttgtgtaaatggattcatataatacgtactcttttttggttcacttttttcgctaaacattttgagattcatctatgtcattgaatgatcaatagcttatttctttttattgctgaatagtagtctgctgtttgtatatgccacaatttgtatagtcattcttctgttgatagacacttggtttatttctggttaatttgatcaagttggggtaatagttcaagtttactgtatcttttctgattttctgtctacatgatttatcaattattgaaagagaagtattaaagtctctggcaacagttgtaatttgtctatttctctttgcagttctgtcagattttgcttcatctattttgaagctctgttattaggagcacatatgtttagaattgttatgtcctcctgattagtagatccctttgtccttaagaaatgttcttgtttatgcctaattcatggcccacaaggcaacattcttattgcttaagtttaatttcaccaattaagactggggactcaagtgaattcaatgcattgtaggaggccaagccacactcatgcctggctcaccttgatgggctgtgcactacaccatatctagtttccttcctgtttccccacttcggaggggcttaatggaagccagatcccagatggggaaggattcgggttagaggtacaggacatggaatatcttggcttattactgggcatgcacctcaacgtggtgacatatgaagacccagaagtggcagaaaggtcaaagtgactttgtctagactctacatttatttttaagacaattttggaaccagagaccagactgttcagtgtgttctgaggtggtgttaaaagaatctactgtacaggggcgacatcctaggtttacagtttcctgactaattccatcataaacttaattgccttttctttggctttgaagcccgaagactcccttggcacagggtttcctccccgtatacccagactcctggcaggaagtaatgactgaatatccaagtgccaggactccttgactcactctccaaacggtgacttctgcctggcccaagacctggactctccctcttcaggagatgatgtcagagagaagccgctttgccagcaacccactggaggctttagaagcaaatgcccaggaatcactacttccaacctctgtcttaaatgctgtcccaagcactgaaacttgcagcttatcatcttatccccacgaacgcagcctctacatagtaggagctctgccagctctgccagatgctttaggtgcattgtctagacttcatttcattcttactgcaaccctcggagccaggtgatagtgtgcccattttatagagagaacattgagggcctcggtgatggtaacaaagttgtgcaaagatacccagctaggaggtacagagccagttaactgactgtaaatacagaactggtcccattactctacacaaatctgtattagtttcctcgggccaccataagacattactaccaagttggaagctcaaggcaataggaatttacttgctcacagttctggaggccagaagtccaaagtcaaggtgttggcaaggtaggttccttctggagagtctgtgagagaagctgttccatgactctctgcaagcgtctggtggctgctgggaacccttggcattcgttggcttgtagatgcatcactagtctctgcctcagtcttcacatgggtttttacatgactgtttttttaaaaaatgttaacttttggccgggcacggtggctcgtgcctgtaatcccagcattttgggaggccgatgccggtggatcacgaggtcaggaggtggccaggccaccttcttgaccaacatggtgaaaccctgtctctactaaaaatacaaaaattagctgggcatggtggtgtgcacctgtaatcccagctacttgggaggctgaggcaggagaatcgcttgaacccaggaggcagaggttgcagtgagcggagatcgcaccactgcactgcagcctgggtaacagagggagactccatctcaaaaaagaaaaaaattaacttttatatcaagtttggtatacatgtacaggtttgttacacgggtaaacttgtgtcatgggggattcttgtacagattatttcaccacccaggtattaagcctagtacccattagttatttttcctgattatcttcttccttctactcttcctccagtaggccccagtgtgggttgttcccttctatgtgtccatgtgttctcataatttagcttccacttacaggtgagaacatacagtatttggttttttgttcctgtgttagtttgctaaggataatggtctccagatccatccatgttcctgcaaaggatataatctcattccttttttatggctgcatggtattccatggtgtatatgtaccacgttttttttttttttttatccaatttaccattgatgggcatttaggttgattccatgtctttgctaatgtgaatagtgctgtaatgaacataagcatacatgtgtctttatgacagaacgatttatattcctttggacatacagccaatagagggattgctgggttatttctgcctttaggtttttttaagaattgccacattgtcttccacaatggttgagctaatttacactcccaccaacagcgtataagtgttcctttttctctacaaccttgccagcatctgctattttttcactttgtagtaattgccattctgactggtgtgagatggtatctcattgtggttttgattagcatttctctagtgatcagtgatgttgagcttttatttcatataattgctgtgcgtggccttcttttgataatagtgaagtaagttggacagttggaagcactgtaggaaaggtaacctaagttaaaagaggatttagagtcaggggcttctgggctgagtcttggggcaatcaactccagctttctacacttgagcttcctcatctataaaatgaggacagtaatgatgtgcaccttgtggggtttcttgtaagaggtaaatgtttgtaaagggcttagccccatgcctggcacctagtccaattaatattagtcatgaaaaaatattattgatatgatggcttccatctcactgtgaataaaacccaaagtccttgccatggtcaacaagaccttccatttatggtctcatcctacccccacccatctttctgatctcatcctaccctcactcatcttttctctgcattttagctgctctaacctcatggtgtttcctgcccaagacctttgtgtttgcagttctttctgcatggcctgctcttccctgcatttgctactcactgtgttctggactctctttaaaagtcatcttattcgagaccttcactgatatttttatttaaaataccacctcctgccttccgtgtgtcccttcccagcacttctggccccatgcactgctttatttatttatttagcacttatcattaattgacatatatacacatatatatacgtacacacacacacacacacacacatatatatatatatgattatttatttttgtctccaccagagtgcaagctcagtgggaatctgtttggctcattgccacatccctagcgcccatgacagtgactggcagatagtagtttccaataactcgttgttacatgaatgaatgaatgaatgaatgaaatctgactggtctgttccagttggtagtgagatccatgtgtataatcctgccccagtagctgtcttttgaagaaatggctcaacagttgattggtaagacagtgaactacagcagagggtagctttgctggatgcctggccagctgagaccacaagggaaatgaccatgtgtgcctagcatatatgccatgcactgtatacagttccttgattttatcttcaaatctactttcatagctgaagaaacatgctcagagaggttaagtcagttgcccaggatcacacagttagtaagtggcaggagctggaattcaaacccatgtctgcttgtctcagcgcctgcctgttttctatcaccccaagctggggtctccctcagctttgacttctagaggaggaaaatatgggtaaagatggaatttgtcccatcagggggctccatgggaaactctccaacctcagctcccagaagagggtcttggcctctggaattcttggcaggaggcatgagatgtgcctggaccctcctgtcactgaccttgaagaagtatctctggaaactcttttaatcaaaaatcccctgcagcttccagccacccacatcttaaatcgtgtcagcagaaccctctcatatttgacattctttcccggagttcctgaccccagcattctccagcagagctatcttaagcattcccacctctgtggttagtggagcaccagagaaggaggggcagagggcaggatgggctgggaggcttcagccactcaccagggacaagaagcagcagttcctccgtggctttgtctcagaaaatccatctctaggaacggttccagaagttgtcatgagatattgggggctcttcaagggatgtctagaatcaagaacccaggattgtgactcagtgcatgctgggtccaacttcagaggcaactgacccaccccacaggcaagcagagtcatctgcctgctgtggctggctctgtgctcagacaatgggaagctgcccccatcctggatctccgagtccatcttgcattgctcccatctccaccatgacacctccattagagtgaagttgaaagcttgtttatggagtcaacatacaacttgtttctggctctggatccttcatgctcacatggaatgtccatcccactttccctgccaatccattgcttggtcgaaacttagccgttatctcagatgcatcctgaaggcttcccaggttagctcacccaacttggattcctccaaaccatactccacgtggtggcacagatctggtgagagcaatcaccctgctcaagagaatccagtggctttcaaagctcttggagaccacgctggcttcctctccagcctcatttttgctgcttctgctctcaagaggtgctccagcctcactgacccccttctttggtcccactttctctttcttcttccaggcctttgtgccagctatccccccatgtactgggtggaatagtgtccccccagaattcatgtccttcccagaaaactcagaatgtgacctcatttggaaatagggtccttgcagacataattggctaagatgagatcctgctggagaagggtaggcccttgaaccaatatgaccagtgtccttataagaagagacacatggggaggagaaggccatgtgaagatggaggcagagattggagtgatgcagccacaagccaaggaatgccaagggttgtccacaatcatgagagcttagggcgaagcaaggtggtctcctttcctgaagccttcaaagagagacggccactgccaaaaccttgatttcagatttctaacctccagacctgagaaagaaaaactttttgttgctggaagccagctagtttgtgatcctttgttatggcagtcctagaaaactcataggaaactaagacactaatcccacagccccagcatggacatgcccttgccaccgccctatcctgtatccaccctgccttcactctagcgcctacattctactgatctcccagcctcaccacatcagacatcacctcctgacctctccaaaccaggtcagattctcccaaaacatatcgtgtctcccatcctcgccacatcagacatcacctcctgacctccccagactaggtcggattccccagaaatacatcaccttttttcttattgaagcaatgctctgtttgcttgccatccgtccctctcactcccatccccagctgtaagttcctggaaggtgaggggtcaggagtatggccctctgagccattccaggcagatctaagcatatttttcagggcacctactaagagatttcctctgaatagttccatggttgtagtagacatgaacatgaacccgtgtgtctgctcagattcccttcactatccttttcttcctccctctaggctggtgtcccaccttgctgggacactctttctcttttagacttcaatggaagctcataccttcagatatagaatttggagtggctacaaaggaaccagatgacacaaccagatggagtcagtttcttgtggagggaaatttgaccaatgggacctgggaaggagctggacacatatattttccctctttctttagtggggaaactctggagtgctttgcctcctcgtagacattcgggagaaatcctgtaggctcagccagcatacctgctgagcagcctcgttgtaaagacggcactgtgatactgcttcccatttcagtttgctctcttttccctttcttcacctcgctgctctgggcttgtatcttgcaaataaagtgccaggctttcatctctttttttttttcaggctttgctttctagagggcccagtccaaaacagtggtcaaataagattaggaatcatccagcactttgggaggccgaggcaggcggatcaagaggtcaggagatcaagatcctggctaacatggtgaaactccgtctctaccaaaaatacaaaaaaaattacctgggcgtggtggcggtcgcctgtagtcccagctacttgggaggctgaggcaggagaatggcatgaacccgggaggcagagcttgcagcaagccgagattgcaccactgcactccggcctgggcgacagagcaagactccttctcaaaaaagaaaagaaaagaaaaaaaaagattaggaatcgtacatactttaccctgctcctcacctagagggcaggttgcaatgcccataagcacgtcaaaggccctgagaagttctgcggtggaaaaaaaacccaaacacctgtttaacttataaggtaatgtttactggacacttactcaatgacaaacaggattctaagaactttacatgtattaatttgttaacattcctactacaaccctctgagctaggaattattatcccatttcacaaatagggaaactgaggcatggagctgttaagtaacttgtctaaggtaatacagttaacaagtagaaaagcctgggttctaatccaggaaggctggctccagagtgagtgctcataatcaccatgctatatacatactttgcttcatctcttattttttgatgatggattgtttttaattggattcacctgttaacatcaactgaactggttctactgaaaagtttgctgtttacagtaggagtttatcttgatttcctgcacagatgtcatgcaaccagcaatgatctttctgcccttatctgcacagaggcctagcccaaccccctgattagcgcataactttgcactacaataaacactctgaggaagggaaggaaggaacaaaggaaggaaaggttgtccttataaaaagaccagggcccctgtcttaaaagaagaaaccctgggtagaaattcagtagcattttcaatttctggttaaggcccagccctcaagttgacagtgaaagccttcttctagtacatgcacggccatcagttgctctacttctttgtggcttctaaacatgggcattgccaagaagaaaactaggaaggtctgctgtgatgatgaggcatgatcccctggtttctgggagtgaagctgccaggtacagttgcataggttgtataccgcacaactgtagcgggtactgttcacatcgttttcattgaacacttgccctgcatgggaactacactgtgtggcaattgcaatgctgaggtttgggtggggtggagtgagagtaattgcaggactaaaatcattacaaacacaatctgtcttatcagggtgtagtccgtgccatatcacaaagcaccaggaagttctgacactggcgcctggaaacttgccctgtctgaggcgagacctgggttccagtgggagtgtctgagtggcatctccctgaccacacggcatggggcactcgcttcctctagcattatgtggagctctgacttgcctctatggacatttggggccagatcatcctttgttgtaggggtctgtcctgtgcattgtaggatgttcagcagcatccctgctccctacccccaagatgccagtagcacccctcatcccaagttgtgcaaccaaaactgtccctaaacattgccaaatgtccttgagaggagccaaatcacctgggtttgagaaacaacactgtagaggttagctcagtgttctctcatacagtcaccactagccacatgtgactttttttttttttttttttgagacagagtctcactctgtcctccaggttggaatgcagtggtgagatctcggctcactgcaaccaccatctcccaggtttaagcgattctcctgcctcagcctcctgaatagctgggattacaggtgcccaccaccatgcctggttaatttttgtattttcaatagagacagggtttcaccatgtttcaccatgttggccaggctggtctcgagctcctgacttcggctgatccgcccatctcccaaagtgctgggattacaggcatgaaccaccactcccggcccacatgcaactttggagcacttgaaacgtgtctggtccaaactgagatgtactctaagtgtaaattatacaccagatttcaaagagttagtgcacaaaaatgtaaaagatctcaataataatctttaaacattgattacacgtcaaaaagaatattcaggatacattgtgctaattaaaatatgttacttcaactgtttctttttaaaactttttaaaatgtggctccaagaaggctaaatattacatgcattccttgcattagatctctactgggcagtgctgatttagctctcctccacttgtattagtcctttaggcaacattgtgaagtcagtttcctggggctgcctctctcttaccctagcctttcccctccccaattcctagagaaacttctgctgcatcttggcactctaagttgagattttttcattttatttacttatttatttttttgagacagtgtttcactcttgtcacccaggctggagtgcagtggcacaatcttggctcactacaacctccgcctcccaggttcaagcaattctcctgcctcagcctcccgagtagctggaattacaggcgtgtaccaacaagcctggctacttttcatatttttactagagacggggtttcgccgtgttggtgaggctggtctggaactcctgatctcaagtgattcaaccatctgggtctcccaaagtgttgggattgcaggcgtgagccactgtgcccagcccctaaattgagatttttactgatcatcctcagatgatctttaaaaagatggtctttggaaagatggtctttgaaatttcaccccatcaaaagcactaaggaggaaggattcaatcagcctgctcctccacactaactggtcacacccctgtcccatgggcatctgcattttgtgccacccggtcacgcggtcctgttgtttttgccaccctggtaccgctccatcagtttctcaaccactgttcctgactctcatcttttctgcaaactaccagacgcattgctctaatcctattcacccctctttaacaattttcgatggctctctcgtgacacccggaggaggaagccctgactcattcgctggagcttcaaagcccattgcaaactggccacaatcccccttcaggaggccatcatcatcacgggctttacttcctgttccaaccaaatgggtacacttccttgcactgttcgcctcttcctcacttggcatcctgccctccttatttctgcccatcaaaacctatttacctgttaggacccttttaaatccctcttcttcccagaagccttcagggtttccatggtgacctttcttatctttaggacatgtcggcaccaattaattgggaacgttcatccaattgtcttgaggacactctggtatcaaactgatcttaatagactgtatcactccttagctttgcatctttgttcagttaatttttttaaagagataaggtctcaatctgttgcccaggctggagcgcagtggagtgatcagggtgcactgttgttgaattcctgggctcaagcaatcctccctccttagccttccaagtagcggggactgtaggtgtgagcaaccatgcccagctattttaaaaatgtttctgtagagatggggtctcactgtgttgtccaggccggcctcaaactcctgggctcaagtgatcctcccatttcagcctctcaaagctctgggattgcaggcctgagccaccatgcctggctaatgtttttcatttctttagctcttcttcactcttcaaatgtctgaaagacttctgtgtgttttagatcttctgtaaacactgcttattaagtttgtaaagtacttgccttatgtgaatatactcactggaataactagagagcgtattttaaagtgagggatcatcctcccacattggagagagatggtgatctatttaagcttcttgctattccctaaaacctccacactgtacatgccacatctgtggattcagaaatatttcttagttagtttaatggggaatgcggcccccattcagaagaacaaatccaatgggagttggttctggtagagacagctgtccaccacaactatgcatggccgggcccagcccaaatgtccttccctccgctgataggggtcttgctggccatggtggcccccagtctttggcagcacatctgaggaacaatctcctttgctgtcttttaggttagtgatttcctacgaagcggctgtcccctcttctgcatccaacttgtcgctcattatttgaaccggcaaatgatggcaattaaccagaatgggggcctcatttctctgcatcaagtggtgccagccttggatgaggagttgtaaacctgattcaaagggagggaggagagacagcgtgcccaggagggtgggccttccagaatcacacgccccacatcaaataacaaatcaacctgccctaagcggttatttctctctatttgcattacagaaaagccaccctccgtttatttggctgtgaatggccctgcctccagccttcctggcaactttgccaagctgggatcagcctcgtgcagggggctggtgctttgccgtcaaaattaccccttcccttttgcttctgtgttcagggcaggacaggaggaagacgaaggtcctcccaggccttttttagggacccgtccagcttggcctaaaagcagcgaagaacccacaggaaactctaccaaatggttctgctcaccaggctctcggtggaatgggggccctgagccacgttcctgggtttccaggggcctgtgctcagagcagccagtaggtgtctccatcacacactattcgaggactcgcaccagagcagacgtagataaggccttcagctcttacccaggttgctcagggaggctctgggggttcctcaggcactgtcttcttgggaggaagcaggagagggcattttagggattgggagaggagcgaagactaggcaggcaggaccaagtgtgaagggatggagggaagggcaagtgcaggtttgcacagtggaagaggagctggaaggtggagcaattcccgctggggaaaggtggggagaagtggggagggaggaaaaggctgagggcaggcaggatttacagaggagttcagtacacagcccctggaggaagggctggggctgggtttgcactgaagttctagctcttactggctgtggggctttaggaaagtgattcaacctctctgctgccactcactcatctataattgaagaccctactaccacatagaggtgttgggctatttaagtgagagtccacatgaatagtgcctgccgcctagtaagcactcagtacatctgagttatttcttattaattcgacaagatgttcaggagaagctggtgcaaacttgcgtggctcctgccccacttgcccgctcctcacccccccttaaagaagcaagaggaggctgggtgcggtggctcatgcctgtaatcccagcactttgggaggctgaagcgggcacatcacttgaggtcaggagttcaagactagcctggccaacatggtgaaagcccgtctctactaaaaatacaaaaattagctgggcttggtggcaggcacctgtaatcccagctactcaggaggctgaggcaggaaaacctcttgaacctgggaagcggaggttgcagtgagccgagttcatgccacttcactccagcctgggaaacagagcgagactctgtctcagaaaaaaaaaaaaaaaaaaaaagcagcagctggaaaacttggaagccagatctattcaaaccagcaggacctgtggtgatgttactcaaggggtccctaagggactggcacaagtcagggtggagctattattttagtggcatcatagatgacaaggggatccccaatgatggaaagcagcaaatgactgctcagctttgaagaaggaaatgagagcagaccagcctgttagccaatggccagcaggcttagccttctttgagaagatgctagaattgaacaccaactatctaagggacacaggggtgatgtagcttagggacaaagagcaggagctctgctatagtaaaggcctcagctctttgtccctaagctaaataaatactaaggctataactggttatgtggctgtagggcaagtgacttcaaccactacagtgcctactaccccccatgagggtgttgtaaggatccaatgagttagtatgtgtgaagggctaaataaatgaggactattactgtgagacaggagggaataaccaaatgatgttgtaaagaccacactgtcccagccaaatcatttacattcatttttgcttaaggagaaaacgtggaaggttggggctacaaggggaatctgatcactttgctgaaccaaaacccagaaaaaagaaaattatcaaggtcataagctcattaagagcgaaggagggaccgggtctcctgagtttaaatactttaagaaattactattactcttcatcctgatgtcaagatataatctatgacagtatttccccaaatgtttcttaaaggaatagtcataggttcttctagaaacaggatcttatggattattacatttggggaatgctgaattagaaaaaaatttacatagatttttttaaattgtaggacttctcagagcctttttttaaatttttttattttattttattttttttagaggagtcttgctctgttgcccaggttggagtacagtgacacgatctcggctcactgcaacctccatctcccaagtcaagtgatctctggctcatttttgtatttttagtagagacagggttttaccatgttggccaggctggtctcgaactcttgacctcaagtgatctgcccacctcggactcccaaagtgctagggttacaggcgtgagccaccacactcggccttctcagagtctttaatatgtctaaacacattgtgactttaaaaattaatagatttttaagttgcaggacttctcagagcatttaatatgtctacacacattgtgactttcctagacaccagtatagggaaaagcatttctcaaaggaataaaccatgctactcttgttttcctggaatatctcatggagctagtattcatggaatatagttgggattaccaatacaattgttcctcagtatccatagggaataggttccaggtcttcccatggatactaaaatatgtggatgctcaagtcacttatataaaatgatgtagtatttgcatgtaacctacacacattctcccatatactttaaatcatctctagcggcacgatctcggctcactgcaaccttcgcctccagggtttaagagattctcctgcctcagcctcctgagtagctgggattacagacgtgcgccaccacacctgactaatttttatatttttagtggagatggggttttaccatgttggtcaggctggtgtcaaactcctgacctcgtgatctgcctgcctcggcctcccaaagtactaggattacaggcgtgagccactgcacctggtgtattattttaaaaaattgttttattattgtattgttattttgaatttttaaaagacattttcagtctgtggttggttgaatctaaggatgcagaaccttaagaatcaatctaaaagttcttattacatataagaacttttgatttcagaatgtctttatggcagtcaagtgtgaataactagctctgggatcatgctatattatcaggtctgcaaataagcatgtcacagtacaatctatgccacttaatctatactgatgaatgtatatatttaacaagaaggatccataccaaatgacagcattagtgtcttcgtggtaggattacaaattgtttttgtttccttcttatgcttatctgtactttgtgaatgttctacaatgaacatatgtgtctagagcccaaaagaaagctgggtctttattgcataatcagtgatgaggcatctacttgaaagaaagccactcctctggggattaactgttgggacctatcttactaatgacttaacaacaaaaggatggggctgtgttcatcagatattcacatgatactaaatgtggtggggtggctcacgctcagagagccaagaataaaattcaaaacaaccatgacaaattgaaaacatggccctacaaaaacaagatgaaattcaatagtgcaattataaggtgatatatttagggctaaaaacagccaccatatgtttagaatgaaggcaggaccagcttccagttggtcagcaactaccaggtgaacccctaccaggtaaccgacctcgagataaggcttggtgccaggcataggtttaggaaaaaaagacctggtaaggatcaaagtccatggaccagggacacatgagcaagatcgtccccaggatcccattgtctgaatacagaatcctaacaaagtggtctggcatgagctacaacttctggtttgcataatggaaggatctctgaaatcagaacaaccttcccattccaggactgccatcgtgtgacctcaccacatcaggatgtcatctgccccctgccaggctaggggaacactttggtgtcacgtccatgtgttagaggcactctggagtccgcagtgggaagcagaaaagttagaagttctgtgacattttactgttttatggggacaatcaaatagaatatttgaaatctgagccatctctgaagaactcgttttggaaaatccagggcatctggtcgcagtcaacagagcgccttgccttcttcaaagctccctggattccgcacacataaaaggcccatgacatgctgtggcccccaagtcatcccccttctcaagtctcacatcagtcagccccttattagactgctgagtcgagtctgtgtcactccctcctaaaagggcttggagaggctggaggatgtccaggcaggagacacaaaaatgatcaaagagctggaaactgggccctgtaaagaaaggttaaaggaattggaagtggtttgcctggaaaaagcgagggagagtctgaagcacccaaattcagagatgaaccacacaaacctcacgttagcctcggttttcctgccacttgcagctttcatttgcagggtcaaatggaagcaataaccaatcgttcactttgatcgtgaacttatgatgctcccagctttctcagtacttggcgtggttatctcatttcattgtcatgaccgtcctatgactgtccctgcctttcagatgaagaagcggaggcccagaagagaagttatgtaactagcttgagttcattccactagggagtgatgggtgcaggctacagactctaggctagggacactagggagtgatgggtgcaggctagggtgcacactagggagtgatgggtgcagaagatgcttcagactacatctccaacagcaagtgtttttatgggtgtccttttttttttttttttttagacaggatcttagagtttcattctgtcaccaaagctggagtgtagtgacgatcatggctcactgcagtcttgaactcctgggctcaagcaatcctcccacctaggcctcccaagcagctgagaacacaggtgcttgccaccacacttggctaattttttaaaatttattttttgtagagttggagtcttgctatgttggccaggctaatctcgaacttctgacttcaagccatcctcctacttcagcctcccaaagtgctgggattacaggcatgagctgccatgcccagcctacaagtaccctttaaaaatgtagcctcatgtcatacagtacagcatgaaatttgcaggtgattgttaacaacaaaaactccttaaatgactgaaggcattgagctgtcaccaggtttgggttcagcaatgtgccctatacaatgtaatatcatcactccccctgttacctcaggtgttgtgggctcaattgtgtgtctcctccccccacccccaaatttttgtgttgaagtcctaacctccagtacttcaagttgtgactgcatttggagatacagtcactgaagaggtaattaagttaaaatgaggtcattagagcaggtcctaatttactatgactgatgtctttataagaaaaggaggttgggacacagataccctcagagtaaagatcatatgaaagcagagggaggcagccaggcgcagtggctcacgcctgtaatcccagcactttgggaggccttggcgggtagatcacttgaggtcaggagtttgagatcagcctggccaacatggcgaaaccccatctctactaaaaatacaaaaattagccaggcattggtggctcatgcctgtagtcccagctactcgagaggctgaggctggagaattgcttgagcctgggaagtggaggttgcagtaagccaagatcatgccactgcactccagcctgggtgacagagcaagaccctgtctcaaaaaaaaaaaaaaaaaaagaaaagacagggagaagacagctggctgagccacggagagagacctcagaagaaaccaaccctgctgacaccttgatcttggacttccagcttccagaactgcaagataataaatttctgttgttgaagccacccagactgtggtactttattatggcagtcccttacaaacaatacactgggcaatcctcaaaataacctcttattaacccccttttaaaaaagaagaaacagagacttggagggtcttagtcacttgcccactgtcacacagagagctggtggcagaaatagattcacatccctttcttgtcattcagagtcccgtgctcctttaacgtccctccagaacatagtggagacaaagaaacacaaacagtgggcaacatttgcctggaaggtcaaacccttgctgacataggctgtgtttccatcctgcagctcagcagaccttcccatcccctaatgtggagacacagagttttatttaatagggaacccaaacatgggcaggaagaccctgtcaattgcaaagcaaacaggggcagaaaggcttggcaaggtgctcttaaaatgcaagtctggggccaggtgaagtggctcatgcctgtaatcccagcactttgggaggctgagtagggtggatcacttgaggtcaggagttcaagaccagcctggccaacatggcaaaaccccgtctctactaaaaatacaaaaattagctgggcatggtggtgcatgactgtaatcccagctacttgggaggctgaggcacgagaattgcttaaacccaggaggtggaggttgcagtgagctgaaatcacaccatggcactccagcctggatgaccgagagagaccctgcctcaaaaagaaataaaaatttaaaaataaaataaatgcaagtctgaaaaagccttactggttcctcagggggataatgcaatgcgtcagtgcatcttgaactataagaaaattccttcagatgaaagaagaacatgctggccatcaccatgctaggaaaaatgtggatttaggccttcataatcagacctccacttcagtacaggggcatgatcaccactgaattaatagtaaaagatgatgaagttccacagcccagctgcagctctacaggtcaaggtaggagatggagtctacagaagaaggcagtcctaggtgctaagggctctaaggggcccccagagatcatcaggatctggcttccctggaggaagcaggtttctggatggggaagtggcatcgggagggggttgtgggatttgctcatagatcttggatcgcaggagatccaatgtcctctgatttctgcccatgaagggaacagtctttgcataccacagtgatgactaccacttatgtcaggtgctgtgagtaccaagtcctttatatctattttatttcaaggcttggtaacatttcaagatattcttattttacatgggaagaaacagaagcacagagaggtaactgaacagaagccacagcaatcataaaaaagggcagacccaagccttgaaaccaagtccgctttattctaagcttcctgccctctaaaatatgccgtgttttctcctgactccctatcttttctttgcttttcaaccttcccagtgttcagcctgacgctatacccagtatgggtgcccagttctgctgaatcaaataacagctatggtaaaacacaacccaaagaatccatctctccattggaccaaagcattatttgagtgtttctcaaagtgccccttgggatgcattgttcctcaccaaaagtgttctatggtcagataaaagtgggagccatgcatattacagccccttctctgagaaccagaaagcacaacagagtgtggaaggagcagaggatgccggatgaactcagcccagcccagcccagcctttgacttcaggaggagctcagcaaatatttattgaccaaacaagtgaatgaatgaatgaccgtgttgaaacatgttcatttggcttacctgagtgtattagcctgctcaggctgccataacaaaatacgttagacctggtggcctcaacaacagaaatttctttttcttttcttttcttttttttttttttttttgagacagagtcttgctttgctgcccaggctggcgtgcagtggtgcaatcttggctcactgcaacctccacctcccagtttcaagtgattctcctgcctcagcctcctgagtagctgggaatataggcatgtgccatcacgcctggcaatttttttttttttttgtatttttagtagagacggggtttcaccatgttggccagactggtcttgaactcctgacctcaggccatccagcctcccaaagtgttggaattacaggtgtgagccaccacgcctggccccagaaatttattttctcacagttctggaggctggacatccaagatcaaggtctagtaggattggtgtctggtgagggctctcctctcaggttgcaggcagctgtcttctcactgtatcctcacatcacctttccttattacacacagagaaagagagaaggagagagagagggagagagagacagagagagaaagcacactctggtgtctcttcttataagcacactaatctcattgaatcagagctccacctcaattactttcttggaggccccatctccaaatacagacacactcaacatattaatttggggtgagacacacatattcaatccatagcacccagtatctcaaacttatttatctagcaaatctccctttggctggtgtgtatccccagaacattgtgttctggaagccattcttatagaaaggctggcctgcgttagggctgcctggcaaggcacccccagatagctgtgctggggtgggaattcccgcagggccaggtttttcaaagtctctcggtagagaaactagaggcagagtggtgaatgagcttgaggtttagggaggaaattcggtcgtgtccagatgccgtctgaggctatggtgaacagaggaaaacaggagacataagaccaagctcagctgcggtgaggcaggcagaattcagggccattcttgtgtcaaacttcaggtcactctacaaagagcagattttccctggagctgagaggtatgcaggagacctagtgtcttagtctgttgggctgctgtaacaacaacaacaaaaatcccacaggctgggtggctgaaaccacagacatttatttctcatgattctggaggctggaaagtccaagatcaagtcttccgcagatctggtgtccgacaagagtgcccttcctgcttcacagacagtcttctcctggctgtgtcctcacatggggtggaggcggaggacgcgtctctctgtgcctcttcttgtaagggcgctaacctcatcacaagagctccactctcacagcccaatcacctcccaaaggccccacctcctaaagcctttactgtggagttaggatttcaacatatggatttggtggggggtgggggcgggcataaacatttagaccataacatctaggaaaaggatcctactatttttcttggaaattgacagggaagagaaattgaagagagattgaaagagagaaagagagagagagagaaggagtagggggtgggagggagggagggagggagagggaaagaaagatggagagggagagattgaagactgaataagcacagcctggacacctaggggtagacacaaaatgacccagcaggaggcaaaacatatagtaggatggaggcaaagtcagtgagtgcctgtaagcactgaatccagtgccacagacccatgctgagtccatgggttgatagcagcttgctctgctgcaaaatttgaatccttcatgcccaccagtgggtgcaagggcagtggggctggacgagttggcaggatgagggctcagcatcacgtcggcaaagtacccactggtgccctgagtgactcaggctgtggcatccccaggggagctctggctaggggctgcttcttcctggggagggggtggccccatgatgcccccctcagaaagagcactcaggttctcctcctgcctctgctgctgacccagttgggttgacctgcggtggtccactctggcctcggctttttatctgcccagtgcccctctgtaagttcccttccaatagtgacaacatggctttacatgatcgtgagggcacctagggaggcttagagcctattggcccaggaagtgaaaaggtctggctccatgggagggaggaaaccacaccacatccccttcccttctccaaagcaggagcccaatcttgttgaatccatgacatgacagagtcagtttggaatatttttgttccattcatgggactctaatggaatcaagaccaggctatttatatttacagatggtgcaaacttgagtggaacatcaaatgtgccagatgtcattaggatagaggaaaattagtgaacttggctaatcgaaatcaaagagcttcccctcccacccccccccccccccccagagaaggctttctggtcccaaaatgcaaagggctgtgaatgtgcagaagataaggaactcggggactggagacccgcttgattgagtgcaacttctgcaacccagcatggaaagtttattccagcatgttttgcttggggaaaaagaaatgcagtcactgtctgcctccattgtttcttctgagactgtgcgggggaccaagcagcaggcgtttcatctccaattattttcagccaagggagaaaacagatggtaaatagcactgaaaaaattctttttagaattaatattaataaaagatgtgttggaggctctgactgaatcccaaggaactagggccagcctcaagtgtgggatgggggaaggggaggtagaggtgtcagaagagggctggggcaggaagagggggcagtagaggaagaccaggcacatgggtctaagctgaattctctccaagcgaccccaaggtgccaggggacaatgcgttggtggtgcacccttgggacgccagcatgtggccaggaactggagccctaatgccatgtggcgcttctggaggttgtgagcactgcagggaaggagggtggtggggccagacgaagggctgcacagtgctcccaaggaatgctggtgccgccgggacccccttccagcaggctgtggcccagatggctcttttgggcaactgcaacacacagtggaggtggttgggtgtactcacctccctggccaatgccagactctgttcccaccccaagtgctatcgagtgtccactgactgcccggctgtcctctgagagttgagattccacattcgagcaaagaaactatttggctcctttggggtttctagacttctctgggagaaagggctgacacacaatgggacatgtgtggaaggggagaggctggttcctggagacattcatttattcagaagaaaacctcttgggctctcactccatgcttgagattactctaggccagcagtccccagcctttttggtaccagtcatttatttcatgaaagacaattttttccatgggctgggtggggggaggggtggtttcaggatgattcaagtgcattacatttattgtgcactttatatctgttattattacattgtaatatataatgaaataattatacaactcaccagaatgtagaatcagtgggagccctgaacttgttttcctgcaactggatggtctcatctggggatgatgggagacagtgacagatcatcaggcattagattctcataaggagcacacaacttagatccctcacatgcacaattcacaatagggtttgtgctcctatgagaatttaatgctgctgatgatctgacaggaggtggagctcaggtggtaatgcaagccatggggagcggctgtaaatacagatgaagcttggtttgctcaccagctaattacctcctgctgtgcagaaacaggccacagaggttggggaccccttttccaggccctagagagacagtgaggagcaaaacaaatgaggtccagccctccagtgagggagagaagcaatcatccaatgcacactcaagtgtgtgtgaactactgtttaccaagaggtttcttctagcttctgtctcccttcagcccagaggttggggacacatgagtttggagaagctgagaagagagtttgtattgcagttatgaactatagacattaacattaaaacaaaagctatctcacaagatagaactcccaacatgggaccatcccattttcctgtctatgcattcttgtttccttccttgccttggccactagaaagcttagaggcaaaagcatggcttacttaagcaataaacataaaggacttcaaggtacatccttgtgaaatgatctcatccccagcttcagcttctcttttctctcatctgtttctttttctttcatctgatatttgttgtttgtattttatcttattaaatatttatgtcttttttgtatgctgtttgaaattctttctgaaacccagtggagagttcataaaccaaacagcatggacattgatggggttcaatgaagacctaaagatcatccttactttatgtgattctggatagatcatgaaccggaaaacaagaattgctataatggacacgttttggggatagctgatgaaattggaacagaactgtggattagataaagcattgtcttaatggaaatttcttaaattcagtaatttactgtggttataaaagagaatgtccttgctcttaggaaatgcacatcagaatattaagaggtcaagggctgcaatgtatgccacctactcaaatggtccaaaagtaaggggaaaatctatctatctatctatatctatctatctatctacttatctacctatgtacctactatctatctagaaagcagaacaggaaaatagtaatagttgcaatctcatacttgaaaaatgagagcacttgtatgtccaaatgaatttgcttcacagttttaattacagagggtgcccctttaaaagggaatctcaaaaaaatgattttgtcttgctttccacactcccttttcttactgccttcttctatcctctctcccaagactcccacccccactggaatgctaaaagaagaccgaattttagagcgattccaggaagaattgctttcagacaattaggcatggtccacatttgcctccggcactggtgtagatataaaaatcccatctaggtcatcagcaagtgtttaagcttttaagcattttcttttggaggtttttattaatccacgaagaaacaccctcaaagtctctccccaagccccaagttcttgtcatttgcaatccaactgctttgggcttcagaagaaaagaaagagaacactgccagtaagggtagtcacagattctctagaatcagaaataagcactttccaccagctccgctgcagctgttgagtcccttccagccctatgcccctccctccctctctctctcacatctcactctgcaccccagttaaggtgggcttggccagagctctgcaagggaactgtgagctcaaacctgtacctgttgttcaagaaaacccagtgtgctccagacttctccccactctgtacttttattcccgaggcatcaagaagtcaaactaaggaaacacccttctaagagggtggcgcatatacacattccagtccctaggctacctggccaagtcttcagttctggccaatgctccctctctccagacgagccgctgtcttcagaccacagggcaaacaccccagtgtcttctgggctggctcaagcccagttgaaaggactttggtttgtacccagcaagagaaaattgatcacacctgcctctctacttagtgaaacctcagtggccttcttatttgttcaccttcctctttccagtgatccttaaccttctgtgggtgttcggctcatctgcacttaagtgaatgataaactgatctttgactctctgatggtccctttctgcaagtcatggaaaaggctattgaaatgcacttctttagcccaaagcaattccaggtgactgggggtcagtaggagttatcccattctatgtatgggggtgggcagggagagggagggaagaaaagatggtaatggcagagaggcttttactgaattaaaaggtgggccggcacggtggctcactcctgtaatcccatcactttgggaggctgaggtgggtggatcatgaggtcgggagatcaagaccatcctggccaacatggtgaaaccccatctctactaaaaatacaaaaattagctgagtgtggcgacgcacacctgtaatcccagctactcaggaggctgaggcaggagaattgcttgaacctgggaggcggaggctgcagtgagatgagatcatgccactgcactccagcctgggtgacacagcaagactccatctcaaaaaaaaaaaaaaaaaaagggtgatggggagttcagagaagcaaagcgactttccttgcaatacctagaagtggcactttatccccatagtccattatctcactcttttccaacactcttcttcgaaccctttcatgcacacagttcaaagtgtttttccatctcagagctctttaatcccagcaataactgcctgacacagcagatgatgacagtgattagactgggagagggaggaaccaaggccaggcagaacaagaggatttagcctgggacacggtcgagttgaccttggcaccccacaggctgcttctgggaggctgggctggagaaggactccagggacaggtagaggcattgtaggtggggagagtgggctgacctggggttcctgggtctctccagccaggggcaacgatggctgaaggccaaggtcaagactgaaaagtagatgcccttcatctagaatctgcacaacctcactgctcagcccctgctccgcctcaaccctccactctgtccctgggtccctcatactctcaaactgcccatcctacagatgccaattggtaggttggaacttgagcatattttggtgtctctggggagtcaaggtgtctgactttcttgaggtgttctgtacttgacccggacaatctcatccctctcttactctcgttttgtttgtttgtttgtttttgagacagagtctcgctctgccgcccaggctggagtccagtggcgcaatctcggctcactgcaagttccacctcctgggttcacaccattctcctgcctcagcctcccgagtagctgggactacaggcgcccgccaccacgcccggctaatttttttgtatttttagtagaaacggggtttcaccgtgttagctaggatggtctcgatctcctgacctcgtgatctgcccgtcttggcctcccaaagtgctgggattacaggcatgagccaccgcgcccggcctgtttgtttttttgagacagaattttgctcttgtcacccaggctagtgcaatggcatgatctcggctcactgcaatctctgcctcctgggttcaagcaattctcctgcctaggcctcccgagtagctgggattacaagtgtgcaccactgcacccagctaatttttgtacttttagtagagacggggtttcactatattggtcaggctagtctcgagctcctgagctcaggcaatctgcccgccttggcctcccaaagtgctgggattacaggtgtgagccaacacacccagccccctctcttactcttaaatgagtttgcttttatttttcttggagccctcctgctgtcagcctacaaatcaacgtatattgagggtgatgtaggcagatgggtgactggggttccccttctgggaaaatgttcttattaattattcagaccttgtgtcaagggctaagtggatgacaattggcatttgggttgaaaagatgcattgggcaatctgcctcccctgccctttaattacaacagtgacaatgaccacccaagcacttaccaccagagccgccagaggatttactaagcatttattctaggctgggcgccatgctcattttgtcccaaaccagactggcctggcgcggtggctcacacctgtaatcccagcactttgggaggctgaggcaggtggatcacctgaggtcaggagttcaagaccagcctgaacaacatggtgaaaccccttttctactaaaaaaaaaacacacaaaaatcagctgggtgtggtggcacccatgtgtaatcccagctactcaggaagctgaggcagtagcatctcttaaacctgggagatggaggttgcagtgagccgagatcacgccactgtactatagcctgggtggcagagtgagactctgtctaaaaaaaaaaaaaaaaagataggctgagattgtccccattttgtagatgaagacattgaggcccaacatatttatgtaacttatagaaagtcctagtgctggtaagtagccaagctgttcctcaaatctgcccaaagtcttcatcttaagtcaaaggcacttcaaagagctcccaggaaatagacaaagggcagcattttatccattgattaaaaaaaatgtatatttccattgccaagatgtgccatgtcttatcctaggcattggggaaaaggggtgtatcaaatgcagaccaagtgcttggagggtctggcgtgtgttgggtccttaaagattgtggtaaattcacagagcgaagggggcagtacttggcaggaaagggtccactttgggtcaggaggtgacatttgggctgagatctgaaggaggagaaggagctaggagaagcaaaatcctgttggagattactgcaaggacaaaggtctagaggcaggactgagtctggcaagtcgaaggaccccaaactggcccagtgtggctgcagagaaatgagctaaggccaaaaaggccgcatcaagggggccttcgcaagtcataggaaggtgttagagttttattttattggtgagattctagcagggagcagaatgttctgattcatgatctaaatagatggctctggtgttgagggatgggttggaatagaagctggagacccatcaggagtgtcagggaggaggcctatgcatcttacactgtgcagagaagaacaaaatcagtaagcaaaaccctagcacctgtactgatactttgctgagcctgggaggcggccgatgcagggcacaaatagaccacatggagcccattgggatggggctcagcctgcttagacatagcacaatgataaggcccattgtaggcaccatccagagggctcagcaccgacttcaccctctcagagctccctcttgaagcagctgctccactggcacacatgctgctctgggtagacgaatccccaaacattcccccttcccatcagcagctgcagtttcagcctctgttttagcccctagctgtgagttcttgtcccacactacacaatgggccagctcaggtgattaaaccccttacatggagctatcgggggcatgaggcaaggagcagaaaaatcatggtagctggcagtctgtggatgtttccctgtaccaggcactctgctaagcacttatgtattgactctggtcttgtcctcaaataaccctatgaggcagacactacgattatcccactttacaggaaactgaggcacaaagcagttaagcaacttcccgaaggtcacagagagagagtcagggagcagccagcattccaacccaagctgtctggctgtggagttcctgccgttgtcttatgccgactgccctctcagaaagtctctcccaggggttaagaacgctcagatccttcaaggtctaggcagcctcagccttctttaaccaggagcaattcatcttccaaaataatgccatcagaaaaatgaggaaacttcaaagagaaacgaaaaggatgagcattctgagaaaccctaatgtgcaaaaatagttaaagaaacagaggattatcagaggagaaaggtccctgttgtggctgagcccacagccttgcttccctgggaaggcagagggctagggaaaccctctggtgcttggttgctgatgctgggagaaccaagcccttctgtgggaaaatcaatgatggcagtgactgttttcctgccacaacaaacctatacttaaatatgattaaatatgctttctgcaaaggaaataccctatagtttatccaaacacggggtcaccctctctctcccatgcactgttccggtggtttacgtggcacgctatattctgaacagggctcaagtctattaggccaagttccaaactattttttttttctagcagtcaggcctcacttagacgccaaacgggtcagaccacgggagctccatccctgagccccactctccccttgagactggggaagggtaaacaccaaatatccccagatggttcctctctgtgactctgagctccacctgctgaccttccagttcgtttttctgagtctctgaaacattcagcttcccttctccatggggaaacattgggaagaacagtgtatttctaggtgacaaaagaaaaacatatatgtttgtccctttctcatatcaggcaattaaaggaattagagggtgacttggtaaaaccaatccccttccctctcctcccacccccaattcaactcagaaatagagataatggtttccattttccctctccagtgtagttggaggaaagccattttattcccctaattatatggacacccactcacatacataaatatccacatatgagatgatacgtgtgcttgtgtgtgtgtgtctacaccctcatgcatctgcttccagatcctgtaattaacaccccataaagaacaattctgtgtacctgaagacaccagcctagatcctgggtgattgacaagccagaaaacttaattttccctctttgtaggagagatcgtttaagctactgtttgatagccttaccagattagccagctctgaactgctttggagaattttgttcctttacccaactccctgactctccctccccacccccagagcgataaggcatctgtaaacactctctgaagctccttccccagcgttcttgggtttgccactttgaagtaaaactgcaggaagacctctgtatgagatgaaaatgtcttgccaactgataaagaagtgcggatccagctaaaatccactcggaaatagggattagtgaacctgagaaggtttgtttggattgaagactgtgttgaaaaaaaaaatgtgagatttggattccatcaaaatgaacccaaaccccagtctcccacccccgccagccccactctgcagacactgtgagtgcccctaccttcacattcagaaagtccttcaatttcagaaatggttatcacttttcctctatgttgtggttctcaaatttcatcaggtgttcaaattgcccaaagagcttgttaaaatgcagattcttggggctatcctgccgcaggatcttatttgcatagtctaggttgagacctagtgaactggatttttaataagactccaggggcttctaaagtgatcaagactagatttttttttttttttttttttttttgagaaggagtatcactctatcgcccaggctggaatgcagtggcgccatctcagctcattgcaacctccacctcctgggttcaagcacctcctgtgcctcagcctcccaactattggctgggactagaggcacgccaccacgcccggctaatttttgtatttttagtagagacagggtttctccacgttggccagaactcctgacttcaggtgatccgcccacctaggcctcccaaagtgccgggattacaggcatgggccactgcacccaaggcaagactagattttttaaaatactgttccagaaccagctgaccagtggccccaataccacatatgcagggctgtgatccagtgggacatcctagcaccgggtagaaaatattgaaatactgagctaatggttgataaacagccatagcttctagtttcctgagtgccatctgctgtcccaactacttgccccctctcccaggacctcctggacttccccacatttcagacacctaacagtgaatgactgacacagcagagggtctctgggtccctgaacctgctgctagggcccgcatctgctctgattggcctgtgtcttatcactggctaagtgttttcactattccccttcacatgcgattgtatgacagaagcatacccagccgtggttgacatcggggacgtggttaaccacttgctcccgcctgcaacacctccctgccattttcctggtttcctactacccttgccctctgtctgctgcttctcttttgcagttccctttttttgttgttgttccatattggtgccctgtcctagtccccttctcctgtctagccctaagtgattactttaagcaccatctatatgtcctgaactcagaaggcaatagacaagcttatcagacttgtgtaaaaagtaaaagttaataattctgaggaaggcagatactctttctcaaaaagaaaagatgcctatggtttattgtgatggtccccagacactcatttgtggattaaccatagcagaattacccaggaatatctaaacgatgaggattcattcaactccttccctagaggaccggtttcagtaggtgtggaataggttctgagaatctctgcttgttcaaaagcagcctaggcaaaggatatgaatagacaattctcaaaagaagatacacaaatggccaagaaacatggaaaaatgctcaaatgcatatcactaattatcaggggtatgcaaattaaaaccacaaggagctaccaccttactcccacaagaatggccataatttaaaaatcaaaaaataatagatgttggtttggatgtggtgataagtgaacacttttacagcagcacaattcacaactgcaaaaatatgcaaccagcctaaatgtccatcaaccaacgaatggatgaggaaattgtgagatacatatatatatataaacacaccatggaatactactcagccattagaaggaacaaaataatggcatttgcagcaacctgggtggagttggagaccattagtctaagtgaagtaactcaggaatggaaaaaccaaatattgtatgttctcacttataagcgggcgctgagctatgaggatgcaaaggcatacgaatgatataatggattttagggactcaggggaaaggtgggaggggagtgagggataacagactgtacattgggtacagtacactgctcaggtaacaggtgcaccaaaatctcagaaattaccactaaataatttatccatgtaagcaaacaccacatgttcccccaaaactagtgaaaaataaataaataaatgataaatagataaataaataaataaaaaagcagcccaaggtgttcgcatgctttttggtaactgctagctggtgcacaggctgcagggagagacctttaccgactgcctctgtggcttgccactactgacattttgagagtggcaattctttgttgtaagaggctgacctatgcatcctgaggagttaagcggcatccctaaactccttctacactctggataccatagcacctctctctcactgtgacaaccaagtctgtctctagacattgctacatttcccctggaggcaaaattgaccctggttgactaactctgctctaggatttcagctatgttctggacagatagatggttgataggagacctctatattctatggactagaagattcagttacccaaaatatacaacaacatacgcagctgttcataagaccaacttcttgtatacgaaatgattgcctaagctgataagtgcatctgtgctggctaattgtgtacatgaaaatcaagaacagcttttcactaatcaaaaagagatatcctggtcaaagcttatttgaagactgccatgttttaaaactcgacacgacttaaaacagaatcctctaagttcctttgcgaaaatactttcaggatgtgttaggtataacaatagtttgctacatgaaaatggctttgaaaatcttaaaagtgttttaaaagaaaagggacttttttttgcaaggcattaaatcagatgtgaatatgacagatttcaaagactgtcaaaataacgaatttacatcataaatgcgtcggctttctttttaaaggctcttccaccactcaggaaggcatttaatggtgagcaggttcaaaatgtcgccagctcccactggtacaaaagggaggcgatccccactagagtctccgggcttcagataatgtctctgcctcttttcaagttaataaactgcactcctgtcaaattgcagataaatgaaagagacagcaccattgttttctcccacatcttgctaagaaagatatctcccaatatttcgggaggaccagtatgccaaaaaataaacttgaaataaatccaccctgccgtgactttaccggatcaaagacgatggaatttccacagaagcacttttctgaagtttgctgtgttttagttcagatagcggctcattatgaagcttctaatgcatttgattgtttcaaagttagccatctaaatttttaatcatgtgtggatgcaagataatcacggggttgggcccaaacactgcaaatccttgatattctaaagagtcatgtcaatataatattttcctgaataatcagcaggtaggcttggggagggggctgcttcaaacagctccactctttgatggaggggtggacaggtttctgaagttgccttttgaaagaaaaataagtctgagcgtttgaaatctggattcctttctttttgagggagtgaggctgctggtctcttttctcctctctctccctttcttttggctgagatgggactgctattaataagatggggagcagagatgtttaactgggattccactctcttcaactggggagtctaggacaagaaactcactcatttactcacactctcaggttaagtttcttccaccacaaaccacaaaatggtttttgtttttacctcctctttggggacagtctggttttctttctcaagaccctagtatttgggagcacagaagggcacaggagcttgctacccatagctgcgtagctctcagcctagtctcagggcatcagctgctttgtgcatgttggagtaggagctgcacttactctgggcagaagatgaggaaggggaaggggcttggaagagaccttgctgcaacctccttgtagaaaatatggcataggtgacctggatcagaagaaccttggggggccaccaaattcatcccatggccttgagacagctcttaatccactccatatttatcgagcatttactctgtgctgacccctgttccaagcactttacacagattaacatatttaatcattacatcagctctgagtggcaggttctttgattggctccattttataggtgaaaaggctgagactcagagctagcgagttgcagaatgaggatttgaacctaggcactcagactccagagtccatgttctggatgtctggatgttgttctcattgatcaagtccaggtagcggagttggttgccaagcctagagtttttataaatacaattaactttgctgttttccagggccatgaaactgacccttctccctggctcaaccagcccttgacaatgaacatgaccagagataggaagtgagatgagataaagcactcagagcaaccaactcttccactgggaagatggccctagacaggaggtccgtggccttgcctttaaagatgaagtgacattgagcatcaatggcttagttccatcatcagactacttggtatttgggataatgagattctgcctgttcataaattcctttatgccaaaccactcgttcgtgcttggataccttatactttatctcctgcaaaaactgtcctatttaaatgctttgttgtctaagtgaatgccaggatagtatttcccatcgagtgttgctttttattttttcttagaagttattatatatatcacaaagactcccattgttttgatgtaacatccaggaagaaatggcccctatgttttataacagcaacaacagattccatttaccaagtgcttactatgtatcaagttctgttttaaacatttaatatatatcagtgcatttaatcccatgtcaagtgtatgagattttgcaattattataatgggaaaactgaggcatagcaaagttaggttacatagttaaggccatatagctagtaagtagtagaatcaagattatatctatatatctatatatctatatatctatatctatatctatatcatctgtatctatatgtctatgtctatatgtctttatcggtgtctgtctataactatctatatctatattagagcagtatttatgcttttttttttttttttgagaaggagtgtcacttttgttgcccaggctggaatgcaatggcacaatctcagctccctgcaaccaccacctcctgggttcaagcgattctcctgcctcagcctcccaagtagctgggattacaggcacatgccaccatgcccagctaatttttgtatttttagtagagacagggtttctccatgttggctaggctggtctcaaactcctgaactcaggtgatccacccacctcggcctcccaaagtgcttgggattacaggcgtgagccaccgtgcccagcctaatagggcagtattataccatgacccacttttgtttggagattatgaattcatcttagatcttattttaaaaacttttccagaaacacaagaacttctctaaacttacagttcacctgtctgtgctcctttgcacaggactctgaaccttagaaggaagccatggcaggtgtacaggagaatgctccagaaagtctcccaagaggcctcagataaggacagcaggataagtttttggagaaagaatcctccatggttactcaggacccactgccaagagatgggccaggtcactgtgtgggtagcagagcaggagcaagctcttatcagtccagccagtgggatctccaaggtaagacaaacatatgagcagacaagtgctcatgaatgctattctacctttctgattaaaaaatgataaaactcaaagcgggcacagatgtggggaaatagtcactctcatactctcagggtgggagagtaaactggtgctacctatctggagggcaattaaaccaacataaacagccctaaaaatgtgcacacttttcaatacacctagcaatttattctaaaagaagcctacatacacacaacgatttagctggatgttccttgcagtactttttataagagtgataaatttgaagccatctaaatgtccaaaaaatagaatattgcatatataatttgaagtaggtctacaacaaagaatattcaatattaaacatgttgcagccattccatatgacatatgaaagagtaattaatgacatagtacacaatgcataccatacaattaagataaaaagcaacttacaaagtaatatatagtaagatttcatatataggaaagaaacacattcacagagaaagaagggtgtagagatagtattagtctgctcaggctgctatgaccaagtgccatagactggatggcttaaacaacagaaatcaattttcccatggcttcagaagttgcgaagtccgagatcaaagtgaagttggtttcctgttgagggctttcgtcctggtttatagccaccttttctctctggggtgacatggtctttcctcagtgcatgtgtatatttaatcgagagatctctttctcctcctcttcttgtaaggcccccaatcctataagattaggaccccattcttatgacctcatttaaccttaattacctctaaaagctctgtcttcaaatacagtcacattagggttaaggcttcaacatatgaagtatggaaggacacagttcaatccatagcagagaagaaaatgttgagtaattgtatgcaaatgatgctgatgataggtttttagttcctttatttccacccaattttttttttacaataaacataatttacttggtgtaataagtaaaaaaaaaagtgtttataagcttcagacttttggtccaagtgattttaatccatgtattatgaattttaattcataatacatatgaatcctgcaggcctcacttttagcaaatcctttggccccatccctccacatctagggttattttattttattttatgttttgagacagagtctcactctgtcacccaggctggagtgcagtggcgcaatctcggctcactgcaaccttcgccccccgggtttaagcgattctcctgcctcagcctccggagtagctaggattacaggtgcccaccaccacacatggctaattttttgtagttttagtagagatggagtctcaccatgttggccaggctggtctcaaacccctgacttcaggtgatctgcccaccttggcctcccaaagtgctgggattacaggcgtgagccaccactcccggcctagggttattttataacatggagcactgcctttctctgctctgaagtagcctgagaagtgcccagatcagagcatctcctgaggctggttcccaagcaggccctgtgtgtggctgacattgttgggccaagtagaacgtggcaagggccgcacagtggctgggacttttgtagatagcaccctttttgtagccatgctacttagaagcggaaccaaagcgcattaggcaaggtggtaacttgagagacaaatatttggggctttgttcaggagggtgccaacaaatccacagcctgaatgtctgggaggagaaattcagcagactggaacagactcagctttggggccaaaccatgaggttcaattaccacgtgggaggccatagacagggagtctccacttacaaattccaccattctcaagcagagaagccaaaaggatcactatcctaccaacctagaaaacatatcaaggacaagatccaggctttgacattcgttcaagtgtttcttccccaaagttcagtctctttctgaggtcaggcctgcagacttggactaatttgcacagatgagcaggaagcataaaagtgaactcagatatgcactgttgcagctatcactgcaatgcaaagtatggactcagccaggagacctgcaccctagtcctcctctactgctgactgcaggtgtaactctgggcaacccatttgcctctctggtctccattgactcagctttcaaactggaataaaaatatgtgcctgcctaccttacaggattatattgaacatagagtccctcttgtttaccgttatatcccttatggcttgtgcagtgcctggcaacaggacaaagctgtagggaaagattccgtggtgatttggaagttgaaactgcttagcccaagggctggggtcaagtcactgtgcaggtagcagagcaagagtgagctctcatcagcccagccaggaggatacctaagggggagacaaacctgtgagcagagaagcacccacatatgtttctagggacaaagaggaagtgcagaagaccactcatgtcttcttgagcacacaatgggtgcttaacaaatatatcttgaggcactggataagaaaagaaaaacatgagttaatacctatgaaagtggtcttcaaagtataaggaaccttagactttgtggcagaggctgagtagctagtcatcttctccctttcctagactttttgttgttgttgttgttgaaacggagtcttgctctgtcgccaggctggagtacaatggtgcgatcttggctcactgcaacctctgcctcccgggttcaagcaattctcctgcctcagcctcccaagtagctgggattacaggcgcacaccaccatactcggctaattttttttttggtacttttagtagagatggagtttcaccatgttggccaggatggtctcgatctcctgacctcgtgatccgcccgccttggcctcccaaagtgctgagattacatgcgtgagtcatcgtgcccagcttcctagactcttttgctggtgtggcagtgtggtagcacgaaacctggccatgaaaatacctgggaagcaaggcattggacacagctcagccatgagatgaaaggagactgcatctctgaatgtccatttgaggaaagcctgccaccaagtcaccaattaggccgacttcttttgattttatgtaaataagtaacaaacatctattttgcatgatcccttatacatcttggaggttaatgagcatctagtgctatcttaactaacatacagtctctgatataattcacatcattgcactgtgaggtttctagaggctatgggatgttggcaagggggtggttctggaatgttggacccaattctgtggcagtgactagcatggaaataagcctcaagagagttagaagcttgtaaaaatgtagctgtgactatgcagtttcaaatggtcccaatgaagatgcacaaggggatatgcctgaagaaactaagtgtaaagggaatgcccagaaagcttacattctaaaggacacatataacaaaaggtgaaaaggtaacataaccaagaacaaagattctaattgtggacaagtagtttagaattagaagaataacatcaggcaggtgagacttctgaaaaatacttaggatgactctattaattagggaaacactagccactgaaatcaacaaagcacagtttgatgggtatatcataattaaagtttctttctcattcacgtaacagttcaatgagggtgtccttatcagcaggaggccttccatgtggtgatgcacggatccatgctctttccaccttgtgtttccactttcctccagggcctcagagccctttgctgtcatcccacaggagcaggagtagaggaagaggaaaatatcacttacatcctaagctgtttagcccagaagtgacacttatcacttctagcatttcactggagagaactagtcacatggcctctctaggtgcaaagaaggctgggaaatgtagtccttggcaagcagtccttcgcaggtaaaaccctacaccatgaaagggaaaggatacattgctggtggatatccagctgtctctgttacagcaatatgaaagacttttcttttttaaagtgatagttaaagcaagaagatgaccaagaaaggggtagacctaccttttgcatctaatgttagagaatttataatggaaaaaagaataggaagttcttcatctcctcttgctttgattctctgtctggaaagagaataatcagactgactagagtagagttgacactggtaagaaggaattaaagccaacctgaaatacttactgactccagttggatctactctcttgactggatggttctaccctagagatctcaagaaaacttgataaaatagtgccaaatcaaacatcacaaataacaataaacacatctgacaaccaaagatgggtaaaatgcactcctaattgttataaaagagaagacggtgttttcatgcatgcttgctggtgtattaatgaccaatcccaggttaagccctagaaagtcctaaaaacaatattttaaagggtagtttgtatgatcttagaaaggtaaatagtgatagttaagagtcagcataggacgggtgtggaggctcatgcctgtaatcccagcactttgggaggccaaggcgggtggatcgagaggtcaggagttcaagatcagcctggccaagatggcgaaaacccgtctctactaaaaatacgaaaattagccgggcgtggttgtgggcgtgactgtaatcccagctactcgggaggctgaggcagagaattgcttgaacttgggaggcagaggttgcagtgagccaagatcgtaccactgcactccagcctgggcaactgagtgagactccatctcaaaaaaaaaaaggagtcagcatcgttctccaaatcaagacaggccaggctagttgcagttttatcttctatggtcataataatctgtaagtcaaggagatgcagtgaaccctgataactgagttttatgcatcacttaacaaagtctcttataaaatccaggggagactatatggcctggcagatgttacaattaggtggattcataactggttgagaaatcatacccaaaaggtgctgataaatcgggagtagaggctactaactcaatacctttaggagtgagacaggtatcatcaatgagtgcgagtggtcaggtgcttggaacagggaatagtgtggggacagaggcaacatagagagcccatgtcttgcctagtggctgcggtcactacacacatccgggtggaatgcgcagtctacaacctatacaatcacacatagctgctcttgttgttgaactgtggagtcagtgttgaacatctttgatcttccagggaaagctagaagtccagatgttggccactaattcaaagttcaaaaaaaagaaaacattatgcaggccaaacaaaacacatctgcaggccacatttggcaatcagaccatcagtgtgtggcttctgaccccaagaaagatttctagtagcacagggctgttgtcattggtcaggttctattcaacatttttatcaatggcttggattaagttctagaaagcatgcgaatcaaattggctgttgacccaaagccagaaggacagctggatgaccggctcgggattttgaataaccttgacagactagggaatgggctgagctgcacgagaaggaactcttggatagtcaaatgttagatcatgtacttatgtcaaaaaaaatttagcagtacaagtacagaatgacttaacaagggcacatgttaagaaaaaacaaatgctgtcaagttttagttgcctgcaaatcaatatgaggcaacagtgtgatgtggttgccaaaaagcaaaggcgatcttaggctgcagcaagaggagtgaatcttgcactgctcaggccaactgtatctggagctctgccttcagttctgggaaacatttgaggaggaacatggagaaactggaacacatttggagcatttcaaccaggagggtgaagagattaaaaagtattcaaatgaaggacagctaaagatgccaagtctccttcccttggagaagggaagcctcagagatacataaatgctgggtttcaacattttggagaattgtcttatggatgaggacccaagtgccaaggcagaaatggtacagagaaccagagctcagttcagtgttcccatacccttcaaacatgtgtctggttaggggaagggctgccccggatgaagttagctccctaaccccacccctaaagttagaaatgtgaaagcagtcgatgggtaacctttggccagggatagggtggagggaatgggtggccatcacagcaatgatggacacacctgagatggaatgcagaaagagtccaggtggggtggagggctttcctagtaattgctgaaaataaacagccacacaatagacctgtgacagacagggctggtagggaatagcacatcaaagaaacttatgggggagggaggccgggcatggtggctcatgcctgtaatcccagcactttgggaggccgagacaggtggatggtttgggtccaggagtttgagaccagactgggcaacatggtgaaaccctatctttacaaaaatacaaaaattagccaggtgtgatgatgtgttcatatagtcccagctacttgggaggctgaggtggtaggactgtttggacctgggagaaagaggttgatcatgccactgcagcctggatgacagagtgaaaccctgtctcaaaaataaaataaaataaaataaaataaaataaaataaaataaaataaaataaaataagagacaagaaacttatgggagagggaagggcaatgacagtgtggatttagaagaaatctaagtatgagcatcattgcaaaccatagtctcaaaagaataaatcatgcaaattagaatcagctgaagacgacacatcagtcctgcgggaggataaggggactgaatgttccactgaattttcagtaaggttgtggaatttctgggtccccttataattgtcttccaattagcttaattgtatatcaccaattgagctacagttctagaacaatgtctccttgagtccttaaaccagaaacctcatggatgaacggttcaacctctttgtagcataaattaggaatttgattctcaggaaggaaaagtgtcttgtctagggtcagatagctggtaagtgacagaaacagaacctgaaccaggtctcctgacccaagcttttttcataatcctcatgactcagtttggacattccatagaaaacttgaccttgcaatcacattcatgctcaaaattatccccgttgtggtggcattaaaaatggtcttggtggtcatgataatggttttcagacacagaaccctcaagagcctcagagatgggtcttcaaatacattcattctggtttccatgtattttccctccaggtggattggttttgagactcacgtttcatatatattctttccgtattatagacctctactttctgtggttcctttggcattttcttgccaaaatgcaggtctagtagggtccctggggagaaactggagccttctcagttcatctgtggaagccaatttccaaatccccttcatagttgtttctcttctctgaagtccaactggcatgatgagggaggtagaggctgccaagttccacccatctgccagattggacctgaactcattccatgggcacagactctgcctgaactcattgccatgccaatctcatcccttgatctcctgggaaatattgctgagacactactgtgtggagatgaagacagcaactgcccacaaggatggggtcactccatgctggggcaccatcacagttcagtgagcccccttcaccttccacccaccagtggccagaaagggtgatggagcaatgctaactggagagtccatgtgtcatcacaccaaggtccaccaggtagaagctttctcttggaggtttggatgttattctgttggggcaaggcttcctggtaatagagctgaggtggcatccacagggtttggctccttgcacatcagcagagaccttggttctctctgttgcctttcccttctgtcttactgaagttcagtgatttcatactttgatagtcgtgattttctcaaaagttatgcgacctttttccactcccaagttctgaaacaggagaaacctgggccaggtgtggtagcttatgccagtaatcccagcactttgggaggccaaggttggaggatggcttgaggccagtagttttagaccagcccgggcaacatagggagaccccatctctaaaaaaaaaaaagaataaaaattaattggatgtagtgtcttatgcctgtagtcccagctattagggaagtagaggtgggaggatcgcttgagcccagggggtcaaggatgcagtaagctgtgatcatgccactgcattccagccttggcaacagagtaagaccctgtgaaagaaagaaagagagagagagagagagaaaccaagaaagaaagaaagaaaccaagaaaccaaggaacaaaggaaggaaggaaggaaggaaggaaagaaccaaggaaccaaggaaagaacctgcgcccttaagcctaactcaaaacaaagcacgggagatcaattgtcttccaatgatgggaggaaacgtacatgttactgttgccaaagaaggaagagaatctttggagtccagagtcttttcctatgctcatgtaggcctaaggctgctctaggaagtgttaaaagcacctgtcagaacaggaagtgagatgacctctaggttaggcagggaatctgagctagggcctgacctcctggtcctcttttacttcatatcacttcatactgactgtcctgtggttgaacaaaatggaaccaaatttgttgcagaccatgagtctggtccttggttttgctcaagagggttctgctcatgagcctttgttggcagtgcagtgatgctggctcacagtgagcagagaaggcctttaggctgagaccaaccctttttgtctgtacctttaaggtgacctccaattggagcatttgtctgtacctttaaggtgatctccaactggacctccaactggagctccaattgtgcacatcaatggcacagtaattttcctgagtgcaagaacatctaattcaatttctgtccttagtacttggccttgctcaccactctgtgatagccagcctccaagatggtccccaatcattcttgttttctgaggctcacacccagtgcaaacccctcccacactgagtagggccaacctgaataaggctggcccatgagtgaacatgatattgcagaaatgatagtgactacttagccaaggttgtaaaacatattgcagcttcctcattgctctttcttaaatcacttgctgtaggagaagccagttgccatggtgtgagggtgctcaaggaaccctatggagaggtcacatgacaaggaaccaaagtctcctgccaacatgtgagtgaatgagccacttggaagcagatcctccaggctgaatcaagccttcagacaactgtaaccccagctgacctcttgactacagtctcagggaggaccctgagctgggaccacccagctaagctgctcttgaattcctgagctgtagaaattataaaagataatacaagtttatcgttgttgctaaattttgggggtaatctatcgcacagtaacagctgatacattctccacaaattcttggtgaatgaatgaatgaataaaaaatgaatgaataaatatgacaaggtcttacaagacttactggtcagtgctattgaaaagaggcaaatggcccatgtcctgccacaaaatgcctcaatacctgtcaatgcagcaggaaggaagtggaaagcctgacatggctcccgttctaccaaaataaactcattttccaccagtccccatcaggcaaggtcctttcccctgtgcccccaacagaccatcctaaatatctgatacctgttccttcatacatcaacactattgcatgggctctctaccttctctggaggctcttccctaattctttctcctggtaattcctacttatatctttaaaaaatgagaagttatttttatttattttttttgaaatggagtttcactcttgttgcccaggctggagtgcagcggtgtgatctcggctcactgcaacctctgcctcccgggttcaagtgattctcctgcctcagcctcccaagtagctgggattacaggcatgcaccaccatgcctggctaattttgtatttttagtagagatggagcttcaccatgtttgccaggctggtattgagctcctgacctcaggtgatccacctgccttgacctcccaaaaaaataagaattaaaaaaatgtccagagtgaacttatgaatccctataaatcctccagggactgtggaccccagtttaagaaactgaacaatatgatggaatattatagtcatttaaatggatattttagaagagtccatgataagaaaaatgtttgttagatactgttaactgaaaaagaaaaacatgcacacttgaacaaatattacatcacgtaatatttgttgttacttatattattaataagtatgatatagttgtatgtataaatgtatggataacaaaataaatccttccaggtattaagtcttatgtaaaaaataaaataaaatacatcctcacataaacttagaggtaagtcgattgagagagggagagtatacataaaatgctaagagttcacctccccaggagagtatgatgaataatttttaaaataattttttgatgttctgtaatgtccagatttctacaatgaacatgtgtacagtgcttataattagaaaaaaatgaggttttttttttttttttgaaaggctgaagacagggcttgtggctgactcctcaggctctgggagaaattctgctcctgggggctggaagaacaaagggacagtcgtgcctactggtccttggagaatctcctgcagtcacagggcaagacctgatagggaccggaggcctcgccaggctcccacaggcacggggagctgggagcagcctaggggccaccatctgggctggaaggtcagagtcttttccttccagcccagcaggagtgggatgaaggggtattgggagagtaggaatacagagcagggactggaaactaggtcaccaggaaatcgaggaaataaacaaagggttcctgtggagggaagctcgctttgatcctgggtgggaatgggacggactgactctgggaagagtgaccaagtgactctgacatcctcagcccaccgtaggctgacacagtgagagccttagagctgcgcatctgggaaggggacagagcccaggagccacccccagcctccctccactctcttactccccgactggccaccccacagctccattcccacttctggtgaccacaccaacctccgaatgaggtctcaatcagacacccacctttgcctctgctgatccctctgcctggaccactctcctcagctctgcttggtgaacaaccctcctttaagagtgagttcggctctccattatccagagcagaattatccatgtttgttttctttctttcctttagttaatttttagaaattgtggtacaatgcacacaacacaaaatttactattttaaccatgtttaattatagagaggtgtttaataaattcacatcattaagcagccatcacccctgtccatctccagaacccttcatcttcctaaactaaaactctgtaaccaaaacacactaatttcccattccctactcccccagccccaggcaaccaccattcactctctatatgaatttgactattctagggacctcacataattgggattatacaatgtttgtccttttgggtctggcttattcacttagcataatgtcctcaaggttcagccatgttgtagcatgtgtcagaatctccttcctttctaaggatgcatcatattccactctatgtatgtaccatattttgtttatccattcatctgtctgttgatggacacttgggttacttccaggttttggctattgtggataaggttgccatgacatgggtgtacaactgggttacattttgactgcagcaaatcttaccttggactgtgctgacatccagcaacactattagctcaatcactagctttactgatgttagaattttatatttaattctactttccatactgcttttctaaaagaggccattggaaaccttcttgtctcttgtgcaagagaagttttcagaaaggggaaatcctagggctgcaccttgcatcaatctaaaccacaaaagcaatcaatacagtttttgtcttcactgaatacttacaagttaggtggaataatgccctccaaatatgttcacatcctaatacttggaactagtgaatatgttaccttatacggcaaaaagaactttgcagatgtgtttgagttaaggattttaagatgcagagattttcctggataatcttgggggatgcactgtaatcaagaatctttataagagggagacgggagggtcagaatcaaaggaggtgatatgataatagaaacagaggtcagagaaatgcaaggaagagcccatgcaccaaggaatgcaggtggcctctagatgctgaaaaagacacaaaaatggattttcctgcagagcttccagaaagaacacagacctgttgtgcttttattttagggcatttgacctccggaacagtaagttaataaatgtgtgggttttcaagccattatgtctatagtgatgtattacaacaatagaaatgaacacactgactgcataccaaacttgttctaagcatgtcactcatttgttaccgttaacctcttcctaccccatgaaataaacgatattattgtccttattatatgggtaggaaactgaggaaagggagtgacttgcccagagcctcctggtgatgattgctttagctgtccataatctttgccccctacttttgggaaagcagccccatttctttgtggcagattatttctctcatcgaggccaatgtgtggccacatgacataaaccaggccaatcctaggatgtgactcttgagctgagtcacctaaagacacagtggttgcagcaaattctttccaacagaggcattttcataactgcctgctacttctctccacccactgcattcccactgcaagagtggccctggttccagcccattttccaagtcagagagtttctgttgttatgtgtgaggaactttgtatcaggttacagcctccacctgagataaggtagacagcaggagtaaggggagcagatcagacttcctgaattccaaaatacctgccatagtcaaatacagcagatttggagggtgtattagtctgttttcacactgctataaagaaatgcctgagactggaaaatttataaagcaaagaggtttaattgactcacagttccccatggctggggaggcctcaggaaacttacaatcgtggcagatggggaagcaggcacatcttacaaggtggcaggtgagagagtgtgtgaaggaggaactgtccaacacttataaaaccatgataactcactcattttcatgagaacagcatgggggaaactgcccccatgatacaatcaccaggtctctccctctacacgtgggttgttgacacaatggtgattacgatttgagatgagatttggatggggacatagagctagaccatatcagagggtcacattccctggttataattctgctcccctcatctgggcacagatagccaagagtggaccacatgataatacacacactttctcatcccccttgaacaagcaggggaaggagtgacaagcaagaaggccttaaagacaagcctctaaacttgctgttgcaatggcatccgatagaagttccccaatctggcaaatcttacaggcttttcttttccaagaggtcccttagggccctgagttgccctcatgactctcaccaccctgcatggtgatgatgtcatttacctgtctgtcttccccaaagccctattgagactcttcttatttgttttatgtcctcagtgcctacagagtgtctgatatggtatccatgctcccacattgtacataggtgagtgagcaaataattctagaaagaagatacgctgcttgcctagatgatagatttctaccccacccggaataatcttcagtggctagatgcttgagcctgcctggctttgcttgatgttcagagcagcatgtcccagagagttcaggtcattctgacatcccagcattttcccatgctaggcaaagctgcaagcaggggcaagccactgctcatggttaagtgttcgtgctgtcttcctacttctgtgtatattatgcacagaaatgcattattttaatttgtacccaaacctccctacccacttcacatctatatcccaaacatgtatcccttaggtccaggaggctggcagcatggtggcctcaaatgcatagcattacaactaattttaagaaaaaaatccagaaaacaaaatcaaaaaaaggctacctttgtctattgctactcttcggggttggattcaccaataataaaatgaggaataatcatccttcagattgtctctttccttctcagacctgctaaacacaagctacagtaagctaaggtcaatttattactgaagaaagaaatttttaaatatttagtgtcgcctaagagtacagtgtttataagtctacagtcatgtacagtaacctcctaggccctcacattcactcaccactcactgacacccagagcaactttcggtcctgccagctccactcatggtaaatgtcctatccaagtgtaccatttttaatctttcatactgtatttttgttgtaccttttggatgtttagatatacaaatacttaccattgtgttactgttgcctacagtattccatacagtctcatgttacacagatttataacttaggagccatacgctataccatatagcttcggtgtgtggtaggctataccatctacatttgtgtgagagtactctatgatgcttacataatgaggaaatcacctaacgatgcatttctcataatgtgtcatcattgttaagtggcacatgatgtctcaatgttgctgggaggactcaaggagcaaataactgtcaggcgtatagcgctgtgggagacactgtaaaggctctgaataatgactgctatggttggatagcagcccccatgactccagtcggagctaagttaattatttctctggctctgattgctttgcccatgaaatgagagaggaaagggctaggctctgcacttcagctgtactgatccctccattccctgtgtgtatctcattccttctcaccattgggactttgtgctcatagttggggcacggaattagttaatattaaattacttagttagcatagttaggattaaattcagctgcatagagagaaaaatctttaaagaaaaaaaacaaccagtgtgtaaaatgatataggagttaatttctctccagataggtagtctaaagctgatctaccagtttcaaaacaatcaaggacctaagctccttctatcttgttgttgtactattctcaacacatagtttctaccttgtggctaatatagctactcagtttgggcaatcatgtctacgttcagctagcagacagttgaaaagttaaggcaaaaggcacgtcggctccttataaagacatttcccggaagttgcacgcagacttccacctatatcctatttgtcagaatttaatcacatggcctcacttccctcaaaggaggctgggaaatatcgttttcattctgaacaaccatatacacaactaaaatttgttgaaaatgtgtcaaaagtttagttcaaactgaaatatgttaaaaatcctctagtaccatcgaggaaacaataggtataccaagtattgaggtatagctagcagtctgtgatacagtatcctcttaccttcccctccttctcctagtaaactcccattcatgaattaggtgaacaattactttcacaaggaagtattatttccatcctaaaagcctattcatttcctttacaacatttattttaggttgtagttacacattttagtgggattatttgattagcccctctttttcttcctaaagtataaacacaatgagaagaagggtattgtctgattttatacactcactttatccccagtgcctagcatagaatctaaaatgtagtaaacacttagttaataatggagtgaaataattgtacattgtaaggatcctactagctctcacttaaccatggccctgtgatgtttcttacattagttagagtgcctcatttggcacctctctaagttagcacttgaatttcttcttcacagatacacacagcctcccacaggactcacagctcatcctcaaaacttactgtaaagctacagtaatcaagacagtgtgatattggtataaagacaaacagatctacagaacagaatagagagtccataaatagacccatgcatacctggaatctaaacaactgacttttaacaaaagtgtaaacacacttcagtggagagagaagagtcttctcaacatatggtgctggaacaattgagtatcgataaaatgaattggacatactggaaaatattgaacatgaataaaaatggacaataaaaagaaataaagttggtcatcaataaaagtgaactttggacatcaaaaatgaataaagaaatgttgagccatactttatatcatgtgaaaacaaattaactttaaatggatcattgacctaaatgctaatacctaaaactataaagtgtctgaatggaactgaacttttgtgacctgagggttaggcaaaagtttcttagaaatgacaccaaaatcataattcatacaagaacaaattattaaattggacttcatcaaaatttaaaacttctgctctttaaaaaagacttaagagaatgaaaagacaaactacagactaaaataaaatatttgtaaagcatatatctaataaaagacttatgtctagaataggcaaagaatgctcaaaattcaataataagaaaacaaaaacaaaaaacctaattaaaaatagtcaaaagatttgaaaagaagctttatcaaagaggatatatggatggcaaataagcacataaaaagatcctcaacatcaattaatttaaattaaaagcagagagagatacaacaacatacctattggaatgtttaaaattggaaatgtctgaccatgtcaagtattggcaaggatgtggaggaactgtaactctcatatacttctgatggaagtgtaaaatgtaaaatgtcacactatggtaccttggaaagtagtttgcccttccttccttccttctttccttccttccttccttccttccttccttccttccttccttccttccctccctccttccttcctttcttctctctttctctctctctctttcgttcttttcttttctcttttctttctttccttgcgtgtctcactctgtcacccaggctggaatgcagtggcagacaaaggcttcctgcagccttgaccctctgggctcaattgatcctcccacctcagcctcctgagtagctgggactacaggtgtgtgtcaccatgcccagctatttaaaaaaaattttttaaatagagatggggtctcattacgttgcccaggctgatctcaaactcctggagtcaagcgatcctcccatcttggcctcccaaagtgttgggatcacaggcatgagccaccatgcttggcttccattttttaaaaaaattaaatacttagctaccatgtcatcctaccattttactcctaggtatttattgaaaagaaatggcaccatatgttctgcatggcttttgcatgaatgtctacagcaactttatttgtttttttaattttaattttaatttatttgtttttttaatcatccagcccaaaatgccaagcaactttatttgtaatagcccaaagctgaaaacaacataaatgtccttgaactacatttatgtagttctcataactcataatgagtggaatactactcaacaataaaaagaaatggaccattgatacacattacaacatacctacattatgcggagtgaaaattcaaacaaaaaagagtactaaattatcttatgtgtctaaaattgtagaaaatgcaaactaatttatggtgacagaaagctgatcatgattgcctggggaccatcgagaagaggggaaggggcagagaggaagaaaggatgaaatatgaagaagcgtgagaaaacttttgagagtgatggatatactcattatcttgattgtagtgatgattttccagatgcatacatatggcaagacttaaaatattgtacatttttgatatgtgcaatttattgtatgtcatctatacctcaaaagattctaggaagacatttcttaaaatgtaaaagaggaaagaagaattgctgtggagagtaaaaaaatactgcatatcaaattcagatatatatatatatatatattcatatatgtatatgaccaagctgtaagcctaacttccatagaaagtatcctaggaatatgtttctaattaacattacaaaatgtaggtatgtgtggccgggcatggtggctcacacctataatcccagcactttgggaggccaaggtgggcagatctcttgagatcaggagttcaagaccagcctggccaacatggtgaaatcctgtctttactaaaaatacaaaatattagccgggtgtggtggtgtgcacctgtagtcctagctacttgggaggccaaggcatgagaattacttgaacatgggagacagaagttgcagcaagctgagactgtgccattgcactccagcctgggcaacagagtgagactctgtctcaaacaaacaaataaaaaaagaaaaaaagaaaagaaaatctaggtatgtgatttagcacattaacagatttttaaatgacaaccatattatcatcttagcaaatgtaacataaaatattcaataaatttaccacccaacaaatcagtaatataagggaactccctcatccaataactttaataaatttcatacctaatgtagaaacattacaagcttccctttaaagtcagaaatgatataaatacggtccctatcactgtgtctactcaacattgcacaggagatcctagccaatgaaataagacaagaaaaacaaatgagaggtaaggttgaaagagaacaaatagtattggcaaagatacaattttccatgtagaaaattcttaaagactctacataaaacctattcaaactattagtataatttttaaagctgattacttgggtacaaattgcatgttgagccagagtcgggcatccagggctataagggactgtgataaataaatctagttaacttcctgccactaagtaaaataacaataactactacttattaacagtctgctataccacaaattctacacttttttttaaaagagaattacatttgattaaccataatatcatctacctataattgaaaacacaggatggaatgtatgtacaagacatagtatttatatagcctatccatagtgcctggtgctcctgcaaatatgcataagttgaagtaaccccaccacccctagatgtctgcaactaacaggttgggatccactgccatggagaattatagcctttggagttagttaggctaaaccctatttccttaaatttttttgtcctgtttatgcatgtgtcttctttccttgtatccagtagtgggaaacaaaagctttctttagacttagggaagtcacagtgtttgcctcttagaagtatgtgatgagtagcaaatatctttggtggggaaagggagagtctttagatcatagatattatttttcatatttcaacaattatttaaggcagatactgttactgtctacatattatagttaaggaaattgaggcaaaaagaagatactaataagtcaacttgcttaggatcacacagctactaagagatagggttcagatttcatccaggtctgtctgatcttaccatccaagctctttcatcctgctaggctacaccactccgaaaagatgaagagttacactgttgtaaaaatatcttcagatgaccatattaaacaaacagaacagtcaagcaggtagttcaaattggcagataataaaacatcaatggctttgaagtccgacaagttttaaatccctgctctgccatttctacctgtatgactagcaagtttccccctgaccctgttactttatttataaaatgataataataaaatgccagttttacagagttgttttgaacattatttagtcattaatttattcagcaaatacatgttgagcaactgctatgtgactggtattgtagtgcttgagatacacagaacagaaaaaaattctgtctcaatgggcctgtgagcaataacaactcagtgtcaataatcacatctggagcccagatcatggtttctaataccattctctaatacaaagaaccaggactccttggagaaatggctgtttctgggctttgggcacagaatatacaagatgagcttgtagcatcttatagtgttagaaagtaggaaagtgctcaaggaacaaaaccatgggggcatatcaataacataggtgccaaccaaaaagggatcccaatagccagaactgagtaacaagataaataacagtattgggttataatctagggtataaaataaatattcatgagtcaatactgatataaaaatgattgcataaataattgaatgggggcactgctcaaagaaatcagagacgatacaaacaaatgaagaaagagtccctgctcatagacaggaaaaaccaatattgttaaaatggctatattgcccagagcaatttataaattcaataatattcctattaagctaccatgactttattcacagagttagaaaaaaattattttaaaattcatatgaaaccaaaaaagaacctgaataaccaaagcaatcctaaataaaaggaacaaaactggaggcatcatgttacttgacctcaaactatactacaaagctacagtaaccaaaactgcatggtactggtataaaaacagagacatacaccaatggaacagcataatgagcccagaaataaagttgcacatctgcaaccatcaacaaaataaataaaaaacaaaaaacaaacaagcaatgggaaaagttctccctattcaataagtggtgctgggataactcactagccatatgcagaagattgaaactggaccccttccttacaccaaatacaaaaagcaactcaagatggcttaaagacttaaatataaaacctaaaactataaaaattctggaagacaacttaggaaatatcattctggacatagaccctgacaaagatttcatgacaaagatgccaaaagcaattgactaaaattgaaaaagtggacctaattaaagagtctctgcacagcaaaaaacaaaaacaaaacaaataaaccaaaaaaaaactatcaataaacagacacctacagaatgggaggaaatatttgcaaatgatgcatctgacaaaggtctaatatccagactctataaggaacttaaacaaattaacaagcaaaaaacaatcccatcaaaaagtgggtaaaggacgtgaacaggcacctttcaaaataagacatatatgtgactaacaagcatacgaaaaatgctcaacatctctaatcattagagaaatgcaaatcaagaccacagtgagatatcatctcacaccagtcagaatggctattataaaaagccaaaaactaacaaatgctggcaacattacagagaaaaaggaatgcttacacactgctggtgagaatataaattagttcagccactgtggaaagcaatgtggggatttttcaaagaacttaaaacagaattactattcaacccagtaatctcattgtggggtatataccccaaaggaatataaattgttcgaccataaagacacaatcatacatatgttcatcatagcactattcacaatagcaaagacatggaatcaacctacatgcccatcaatggtagactgaataaagaaaatgtggtacatatacactgtggaatactgtgcagccataaaaaaggatgagatcacgtcctttgcagcaatgaggatggacccggaggccattaccctaagcaaaataatgcaggaacagaaaaccaaataccacatgagttgtcacttgtaagtgggaactaaacattgagtacacagtgacacaaataagttaacaatagacatgggagcctacttgagggtggagggtgggagaagggagaggataaaacaactgcctatcaggtgttatgcttattacccgggtgatgaaataatctgcacatcaaacccctgtgacatgcaatttacctgtgtaaccaacctgcacatgtatccctgatcctataaataaataataataattttaataatttatgtaggtgctccaccatcagtgagtatgggctattgtatttctggggctgccacaacaaaatcccataatctgaatggcttaaacaacagagatttcttttctcatagttctggagtctggaagtccaatatcaaaatgtcagtaggtttggtttcttctgaggcccctcaccttgacttgcagattgccatcgtcttcttgtgtcttcacgtggtcttttctctgtgcacatgcatatcaggttcaaatttcttcttaaaataacaccagtcatattggattagcacacatcttaaagacgtcctttaacttaattacctctttgtaaactttatctcaaatatggtcacattctgagatactggaggtgaggacttcaaaatataaattttgggagaacacattcagcctacattggctgtgcttactgacttgcttccaaagagtaagctatagaaaagcgggaggggaaatgtaactttacggtggcaaaacctggcaaacattacctcagccagtggatcaaggttaacatcctcagtgataagttgtgttgataatatgatctttgctataaaggatgagagtaacactttacctctatgctcttccttccaaaaacccgtaactcctaaccatgagaaaaacatcagataaactccctcctgaaggacattcttcaaaatacctggccagtgctcctgaaaactgtcattaccaaaaacaaggaaagtctgagaaactctcacatatcacaggaacccaaggacatatgacaattaaaagcaatgtaagatcctggaagggaccctgaaagagaaaaaggacatgaggaagaattagcgaagtccgaataacgtctgcaggttagttaatagtaatgcactcatatcatttccttttctttctttcttctccttttttttttttttttttttttttttttgacagagtcttcctctgttgcccaggctggagtgcagtagtgtgatctcagctcactgcaacctccgcctccctggttcaagtgattctcatgcgtcagcctcccgagtagctgagattacaggcatgcaccatcaggcctggctaatttttacatttttagtagagacagggtttcaccatgttggccaggctggtcttgaactcctgacctcaaataatccacctgcctcggcctcccaaggtgctgggattacaggcgggagccatggcgcctggccccgctgtcatttctttagctgtgacaaatgtaccataataatgtaagaaattaacaatgggagaaactggatgtggggtgcatggaaactctattatctttgcaacttttctgtaaatctaaaactcttcgaaaataaaaaactgtattttaaaaaacttcctgcccttgtggacttatattctggtaggtggacagggacaaccaacaataaacaataagtaagtttaaattcagtacattatatagtatgtgtgaaggaaatacatactctatttaattattcatgtggcagccctgctttccaaatattttggtaggatgatgttcaaatgaattgcatgataaagtccacataacagagggcaaggagaaacaaccctaaaactcgctggttcacaagaggaagaaagatttaaacatttgcctacaggtgatccacaaaatgagatgaaatatagcaacacacctgagaactgatggctgtctatttcattaaaaatctcctgggaagggaggggaacatcacacaccggggcctgtcgggggatgggggtcaaggggagggagagcattaagacagatacctaatgtatgaggggcttaaaacctagatgatggggccgggcacggtggctcatgcctgttatcccagcactttgggaggccaaggctggtggatcacctgaggtcaggagttcgagactagcctgaccaacatggagaaaccgcatctctactaaaaatacaaaattagccaggtgtggtggcacatgcctgtaatcccagctactcgggaggctgaggcaggagaattgcttgaactcgggaggaggaggttgcagtgagccgagatcgcaccattgcactccagcctgggcaacaagagcgaaactccatctcaaaaaaaaaaaaaaaacaacctaaatgatgggttgatagatgcagcaaaccaccatggcacatgtgtatctatataacaaacctgcatgatctacacatgtatgccagagcttaaaataaaattaaaaaaaaaaatctcctgggaaagaggttttataagagcccattcttttaggtaacaagcccaagatttggaaagttctattttaaaattcccattattggtgataaataatgataacaaaaacgagttaagaggtttctccatgttggtcaggctggtctcgaactcctgacctcaggtgatctaccagccttggcctcccaaagtgctgggatgtatggagctatgtatgtatggagctatgaaaataattatagccatgtatcctaagtgtagagtattataaagtctacagtagtgggcagtaacatcctaggccttcatgttcactcaccactcattcactgactctcccagagcaacttttagtcctgcaagctgcattcctgctaagtgccctgtacaagtgcaccattttgtatcttttatattgtatttttactgcaccttttctaggtttagatatgttttctatgtttaaatatgctctttggcatgccaactgggtgtcataataaccctgcaaaggagatcatatttcatccattttacaggtaaaaaaactgaagtaccgtgtgtttagaaaacttgccccaagcaaagccagtaaccaggtgcggtggctcatgccagtaatcacagcactttgggagatcaaggcgggcagatcacctgaggtcaggagttcgagaccagcctggccaacatggtgaaaccccgtctctactaaaaatacaaaaactagccaggtggggtggcgggcgcctgtagtcccagctactcagtaggctgaggtgggagaatagcttgaatccgggaggcggaggttgcagtgagccaagatcacgccaccgcactccagcctgggcgacaaagggagactccatctcacaaaaaaaaaaaagaataaaagaaaacgccccaagtcgtggaatttaagccttagtacctaaattcctcctgttagtctttgacgttgaggaccaagtacaaggcgaggtcagctcatttgttccattcttaggagccatgggggcctagtaccccacgctcccttaaaataggctggccagacacccccaccccaacccacctcgacgcatgccaaagaaccagaaaagctccatttatgtggtcccacaggaagcaaacacacgcagggctggtgacggtgactcacaacttctaaccctcctcctggcccgttgcataaacttttccaatgtattgaagtcttgtagaaacagtgcttcatgggaagatatcaaggaaggcgtcccaggagccaaccagcaggacctactcggaatcctcggcccctttttgaggtttctctttttttttttccctcagcaattcctttcaaaaaaaatttttccctcaccattgaccttgttagagttgctagtactttttccccttacactgtagcacttctgtaaatgtttttgttctttgttctacttcctgcactctttgagcttggctgtgatgtctgttcagtggggcctttctgatccagttggcccttgcctgtacatcctctccacaggtatcaaaaatgagggcagcacggcctggagggcccctcattagagggaggcggctcagctctcccaccagtcacaagcggagagggcagagccgactccacgaatgaccagtattgaaaagaaagctccaggggtgagagagagacacagactggcagagtcagaagcagaaggttaaaaaaagaaaagggggagaaaaaaacaaaaaaaaaaaaaaaaaaattctttctgactgcctcagcggctccctttcacgacctgaggctttccagaaaaatgtcttgtgaagagcaaccatttcaagctgcacactcttccatcagagggcaacaccttggtacattgggcattcattcccaggctgtgggccaggcttggctctccactctggagatgaggagatgccttttatcccaggaaactctgccacggtaatcagagggtgtgttggtggccagctccagtaggaccagagtccaggaactttgcttggaatccagatgagtcagtctccttggagggaggaggatgaagagagaggccttggagcactgcccagggtgggccagggctgggtgcaagacctgggcagacagctacagtggttggcagggatgttggctttccccaaaatggagaggcttggccctctacaaagagcaccatttattctgcatagtgcaagcagcactggctgcaggcaactgaagacctggcttcaagcctcggctgacccagtgtgaccttgaacaaaccatcccaaccctctgaactttatttccttttccataaaatggggacaatgccttgtctttattctgcgttgactgtgtgttttcttgagcacctactccatgccagctactggaaatagaaagacatcaagatggcaagatgcctgccctcaaagaccaatcactctagtaggagaggtggacacataaattgatcattaaagtctggcgggatgagtacagtgaaagaggtatattcagggcgaagaaataacacaggggaaacagggattctttctttctagggagatcattgatgctgatgttcaagtcttgaaagttaactgaggagtttgataagcgaatgagtggagaagagaaaatggcattgtaagcagcagacactcttggtagcaaagtatgaggagctcaaaaaaactgggatgtgttttgtagagatggagaatggggtaccagttgtgtgtgtgtgtgtgtgagagagaggcagggccatgactagagtgaagcaagtgaggcctttgcctagtgccccaaatttaagtagacaacagaagaacaacctcagtcatcaagataaataaaatgtccatgcaagattttaaaaactcaaaattaatgcaaaaaaattgatggtgaaaacagtgacaaaattttaaatagaggcaggactgggccacgtgcttgcacaactcaccttagttgcctctccctaatcctggctctgtcagatcctcccaccctttatccagcccaaacatgaaggttcaataaacgtgggtatttctgagcaagccttcagtgtaacacagcatctgttctctcttttcaaagagcatcttcctctagtctatgggggacagtgggggtagaaggaggtcagggcttgttagtttttctgctgatcgtcatgctgtccccatttgacacagtgctgctgctgctgctgttatggtgccctcagaggagggatagtcccggggcagaccccacttcccttgacctctttaattcccctcagcacacatacattgccaacaataaggctgtcgtttatatagtggatgttactgaaagtatagagataaatagaaaagaaataatgtaaggaaaagtgtttcaaactgaatatgaaatatgaaggtttccagaactgaagggaatcaggaaaagagaaaataggataaactcttccaagctgagcttccttgccttaagggatttttctttccttctttctttagacatagactcacctcaatccttttatctctgtttctctttaggaaaaacattttgtttttcctaaaagtgtttgaggccgggcatggtggctcacacctgcaatcccaacactttggcaggcaaaggcgggtggatcacctgaggtcaggcgttccagaccagcctgaccaacatggagaaaccccgtctctactaaaaatacaaaattagctgggcgtggtggcacaagcctgtaatcccaacttcttgggaggctgaggcaagagaatcgcttaaacctggggggcagacgttgcagtgagccaagatcatgccattgcactccagcctgggcaataagagcgaaattaagtctcaaaagaaaaaaaaagtgtttgaaacatgaaacaaaatgtttgttttgtctgggagctgttttgccacccaccagtgcaattcatgggatacaataatctctgaactagaatccgaccacctgagtgacacatcctgcagtaacactgtaggggtcttctgtggggaaagccagggtaggcactggtgctgcaggtttagtctctttcaaagtcttggcaccagtgagactttagacttggacagaatacatataacttccatggatatcatacagttctcaaagatagtggaacctaaactcatattcagagtaagaaatattttcttaaaatgacatattgatcaagagtttcccagtccctaatacagaaatataggcagagaaatttctatttttcttttttacgaattcttctgcttatagaacatgtccaccagacctaagaaatgggagctgttccattaccttcacaaacagtcatgcactctttatgtccatcctagctacatgaagcctaggtagaagctttgaaattccactttttctccactttagctaataaaattcttaatcatgcctgtcagcactctggaagtagaaggagggtacagaatcaaggtttgtttgcctcaatccagagcacgtcttcaaaagtaaggaaagagagggcttcttccataaattatatcaggcacagaattcctctgccacgaattctaggcttgtcataggctttactgagttttctcccttaagtaaaaaaataggtgggaacaaatggtaaaactgaaatgttataactctaaggccactgcagcttgagccatgtgcagtcagtgatagggagagaaaaaagcttgtattctaacaggcagtccaatgattggtccaggagatcttactacttctaaatctacataccaaatccagtggtttaaactatatattgaggggatataggaaagtctccttacaagatgagtgcaattcatgcaatactgagtatgtgatgattaaataatgccatctcaaacttcacttccaggaatgaagaacaaggtaacttagactaatctcccaaactatgtaccatgagataagttggataaagcagtcttaaaatcactctaaggcaggagagtattaacaaggtactgaagaattattgggccaagatctaggagagtttggcaacccagagagatgagcctggatttcaggactgcttttcctctgggagcttttggcaattctagaagagacactgagaagctgaaaggctgaacagtaccttctgcagactcccagcagtaagagaataaagttgttgtccattgtcttccaaggttgaatggcacctggtaagacttctgcacttagaaagatctatggcaaagactacagtccaggtttcagtaatctcaatggaaatgggattaaggcaatgccatattgctaatgttccctatagaagcaaaagaaaattctttctagaagatagtcatcatcttagttcacaaattattcccaaaaatcatttttcaaatacaaagcctagctcacagtcatcatcatcattatgatcatcaccatcatcatcaaataaaaaaaaagacaagaaaacatgaatgagaactagtgaggtaaagataatagaaacagatctacagggactccagatactgaagttattagacacagactttaaaataactatgcttactatgatcatgaagaagaagataagagagaatttttggcaagtaactctaaaatactttttttaaaaaagagagaagatagcatattttaaaagaaaccaaaaagaaaacatagaactaaaatacataataacaaaaattagaactcaatgaatagatttttgtataaaattagacaaaactgaagagagaattggtgaaatggaaggtaggtcaaacataatcacaatgaaggagagagaaagagaaggaaagactaaagtgatgttataaaaacaaattggagccaggtgtggtgactcacacctgtaatcccagcactttgggaggctgaggcaggtggatcccctgaggtcaggagtttgagaccagcctgaccaacgtagacaaaccccatctctactaaaaatacaaaattttcagggcgtggtggcacatgcctgtaatcccagctacttgggagactgaggcaggagaattgcttgaacctgggaggcagaggttgcagtgagcccagatcatgccattgcacttcaacctgcgcaacaagagcaaaactccatctcaaaaaaaaaaaaaaagaaaaagtaagttaaataaaaacatttcagatgaacaaaaactaagtattcatcacaagcacacttacactaaaggaaatactgaagtgtatttcagacagaggaaaagttttctcagataaaaagtaggaaatgcaagaaagaatgaagaccaaaaacatgaaaatatgtggataaatctaaatggattgtctaaaacagtaataataaagagatagataaatagccccctgttgagaaaaattgttccagagtaaccagtagagaaagagcaaaagagtgtgtaacttgcaagttactagataaataaaataggatgataaaatatacttaatccaaatgaaccctcactgtctcaaaaggaaaaaaataaagacaataggacagtgaaacaataggcagttctgagtaaaatcatacatgtcaacccaaatgcttcagtaattgcatcaaatataaatggattaaatgtgccaattaaaaggcaaagattgacaacttagattattattattatgtatatacattttttgagacagagtctcactctgttgcccaggctggagtgcaatggtgcagtctcggctcactgcaacgtctgcctcccaggttcaagctattctcctgcctcagcctcccgagtagctgggactacaggcgtctgccaccatgcccagctaatttttgtattttcagtagagatggggttccaccatattggccaggctggtcttgacctcctgactcaggtgatccacctgcctaggcctcccaaagtgctggaattacaggcatgagccactgtgtctggccaccaacttagactattttttaataacacctaactatttgactttccccagagattcatatgaaatataaggatataaaaaggttcaaagtaaaagcatggaacaaggtttaccatgtaaacataaaacaaaagaaggcctgtataactatattcgatcagacaatgtagattttaagggaaaaaataattgctaatgacaagaaagtttaaaatgcgaaaagttaaaattcataagcaagtcagatagtagttctgaattgtatgcagcaaacaagaccactttaaaatatataaagcaacaattttcagaagtgtaaggagaatgaataagtccacagtcgtagagaaatattttaatacagttcttaagttactaataaaacagacaaacaatcagtaagaatatagtagattggaataacataattggcaaacttgacttaattgatatatatagaatgctggaatcaacaactccaaatacacattctttttaagcattccttaaaaacatgatctataaatgaatatatgctggatcataaagcaagtatcaataaatttcaaatattgaaatcatacttaataaattctctgaacacaatgcaattaagctagaaatcagtaatcaaacaataagtagaaaattcccatatgtttattaagtgatatacttctaaaacatacacatgtaaaagaataaatcataatggaaattagaaaatatttttaactgaataatgatgaaatgtggcacatcaaaatttgtgggatacagctaaagtaatgcttagagtaagctacatatccttagtttcatacattagactaaaaaaaaaaagcctgaagctcagcaacctaagtaccaaacttgagaagttagaaaaaaagaacagtaaattaacctccctcccccacaaagtagaaggtaataagaaataaagctaatagcagaaattaatagaatagaaaacaaacaaaaatatagaaattaaataatgccaaaagctgattctttaaaataattaataaaactgataattccctcataaggttaatcaaataaaaaggaaagaagacacaaataaccattatcaagaattaagtttaaaaggagacattactgcgattcttaaaggcatgaaaatgataacaaaagaagatattataaataactttacactaatacgtttgaaaatttaaatgtaataaatatttaggaaagtttagtttaccaaaactgacactagaagaattgaaaaatgtgaataattctaaatctaatagaaacaataaatctgtgattataaagttttccaacattgaaagattcaggtccagacggcttcaccagtaaattatttcaaacacttaagaaaaaaacaacaccaattttgtatggactcttcgagaaaataaaaaaagatgaaaagtttttcagttcaatttatgaagacagtgtaacgttgacatcaaaatctgatgaggcatttataagaaaggaaaattacaggctgatgtatcatataaataaagacacaaattctgaacacaagattggaaaaccaaatcctgagatactaaaaaaagataatatattataaccaagttgagtttattgcagtaattctgggtagacttttatttcagtaataaattcaactttgcttaacactagaaaattaaccactgcaattcaccatactagcaaaataaataagcaaaattgtattatctctataaatgtggaaaatttgctttataaaattttacaaccatttatgatcaaaaataaaagcctttataaattaggaatagaagagaactttcttaacctgataaagggtatttacccaaaacaacttactacaaacattatatttatacagtctccccttgagatcaggaaagacacgtggttgctcactacaaccacttctatttagcattatactgaaagacctagccagtgcagtaaggcaaggaaaagaaataaaggtataagaaatattattcacgaacagcacaattgtgcttgtagaaaatgtaaaagaatctctgatcaactgaaataaataagagatttagaaaattatttgaatataaatttaatattaaaaatctaatatatttctatataccagcaacaattagaaaatgaaattttatttttacatacatacaaagccattaaacatataggtaagctggaaactagttaagctattcaggaccactattagaaaatttacaaaagattattgaggaaaattgaagataattttaaaaaatagataattgtatcatattcatatattgaaagatgttaattctccctaaactgatctgtagattcaatgcaatcccaatcaaaatctcaatagatattttatgcgtgcatatattaacaagttgatcctaaaatttatactgaaatgcatatagccacgaatagccaagaaaatattgagaaagaatgataaaatacaagtaccagctctacctgatatgaagacattaattgctatatttaagacattgtggtaatggtgacatgttagataaatgagccaaaataataaaatggagaattcagaaacctaccaatacatatataaaaacttgatatattataaagttggcactactggacaatgaaaaaagcagaaaacatctttacaataaatagtactgggtcaattggatatgcatatagaataaaattaatactgattcttttttatatcatctatgaaaatcaattctgtgtagattttagatgtaaatagtaaagctacaatgcagaaaaacatcttcacgatctcagagtaagcaaagatttcctaaacagaattcagaaagcacttaccataaagtaaaagtttagcaaattggactacatcaaaattagtaacatccttccccccccgccacagacaccatcataaagcgagaaggcaagccacatgatgggagaagatatttgcagtaaatataacaacaaagaactcaatgtaaaatatataaagaactcttacaaatcaataagaaaaagccagaagtcccagtagaaacatggtcaaaagatattagtgggtagtttacacattggatattcaaatgtcctctaaacaagaaaaggtgattaatttcattagtcatcaagaaaggcacattataaccgcaatgacttacctctatatacccatcacaatggctaatatttaaaaagcaaaaaccactagtactaataattggtaaggatgtgaagtaactagacctctcatgcgtagcttatggaagtgtaaattattacaatcactcaggaaaactatctggcattctttactgaggttgaagataggcttatcctgtgagcaattttactcttaagtatatgcctaacagaaatatatgtacctgtgtaccacaaggctgacacacaagtgtccctagcaacatcattcatgttggccaaaaattggagacaaaccacatgtctatcaacagcagaatgaataataaattgtggaatattcacataatggaatgctatctggcaatgaaattgaacgaaccaaagtaacacaacagagtggatccgtctcacgatgctgcacaaaagacatcaaatgcaagaagatgcgttcctttgtgtcctgtatgattcaatttatatacaactcaaaaaagcaggcaaactgctatagtgtttaggaatgcacacttaggtgatatagctataaataaaataaggaagaggttataaaatttactcgtggtggagagggaaagattagtaatagggaggggatatgaggggatatgagggatcagtgacggggaggggatattagagtgtgtttttttgttctggctacatgggtattcaaaataaatctgtagtaatatactgagccatacatttttgctttgtacacttttctgtatggatgttgtcaatcttgggtttatgttcagcagctcctgctgaacctctgtggaagagcgatgggtgcaaatactatggaacaggaagcaatatatgagtccattcttatgccccatgagggatccactctcagcctctccaaggaggaagtgactcttttcaccaaacaaggcttgaaaccctggcccatctccagacctcggaagaaaacggactcttccagtcaacaaaaccatcatcatttgcttcagtggctacccctaaggaggagaggggaatgaggaacccgggctggggagactgactttcctggtggtttcttactataagcatatattacagtcattgaaaaaaatttttttagacatggtctttttctgtcacccaggctggattgcagtgggttgatcttaagctcactgcagcctcaaacttctgggctcaagtgatcctccttcctcagcctcctgagtagctgggactacaggcatgtgccaggcacccacctaattttttgtagagatgggatcttgctttgtttcccaggctggtctcaaactcctggcctcaagaaatcctccggccttggcctcctgaaatgctgagattacaggagtgagacactgcatccagtctgaggagagaaaaagagagaaagagatgatgacagtgttaaaaaagaatgaggtgagcagggcatggtggctcatgcctataatctcagcactttgggagactgaggtgggagggtcagttgagcccaggaactcgggaccagcctgggtaacatagtgagacctcatctctattaaaaaaaaaaaaaaaaaagaatgaggcagaagacatgaactgaaatagaaatcagatagataggtagataggtagatagccaagttcaaaaaggaagtcacagaatgatatacaattatgtatatataggataatctgatgatttagcaataaaaattatatatatatataagtattacaaattttgaaactcatgtccaggtgttcaaaataattgactactttgaaatacaacttagtggtaggaaatagagtcatagtcgattctaaggaaactcactccataagattttttcctctttttattcccccaggtggcctctgatcttggaaggaagagtgctcagacagtgtcctgctgctagaagaagggtctcgtctgggggctgtgtctgtccacgccagattccctgttgatggatgctccagtctggcccccaggagaggctcacaccacacctgcttcactggagggatctccactgctctctccctacctcccaggtctcctgagcctcccttctagctactgcagcggtccttttattcacaacagcagaggcgtgtgaggttggctctccctcaagctctcctctaggaccatgggacacccagtggcactgcctcatgtcctctctggccctggcagaccttgtggctggctctattgtttccacaccatggagaccgagagctcctcagtggcagccacttcccagccagggacccaggggcacagttccactgtgttggtggatttccagacatttccaagggagggttcttttgccaccttctcgctcttgcagcttgctgggagtgagagcagcacgtgagtaggggtctgtgtagggttcacatccaccagcccctgactctctgactcctcctattcctctgtccagacagtgcatgccccaggctggtggggaaaaactcctcagcaaggaagttggtctcctggactctggttttttaatacataaatgcgaaaatattttgatgcctttgttctctgcatttgtggtcacaactctccctcagggcaacaagaggtaggaagaaaacgtgaagaagaaagaaatcgacatttgtccctattatgtgatatcatcctgccacctgtgtgtggctgtggctgttggggggaagatctggaaggaagcccagtgacccactcttgggggttattataagaacagaagtgagctggagcaaggtgcaggcagggagagagagagagacttcattttttatcttatatgttaggttggtgctaaagtaattgcggctttgcaattacttttaatggcaaaaccgcaattgcttttcaccaatctaatacttctgcaatgtctgaaatgtttgaaatgtttacagtaagtctataatcacacattcttgcagtaattttgaaattacagtttttttgttttaaaaggaaacaaaattgatagtactcagaggcttctgtggctgaatgcagaagcacaggttaaacttagaggtggaggctctgaagggcattttggaaatattaatatttctcaacagagaaatggatgttttcattcccatcagcgtagtagtcccctttttggaaatttgtcgtaagaactgatcaaagatgcataattaatatacaaaattttcatagtaacatttataatggccaaaaattaggtgcaataatagggaattcgggtgagctgtggtgtaaccatgttatgagctactacatggtcattaaaatggtgatatgggccagacactgtggttcatgcctgtaatcccagcactttgggaggccagggcgggtagttcacttgaggtcagcagttctgggtatccagcctgggcatcacagagaaatcccatctctactaaaaatacaaaaattcaccggatgtggtggtcagtgcatgtagtcccagctactcaggaggctaaggcatgagcatcacttcaacctgggaagtggaggttgcagtgagccaagatggtgccactgcactccagcctgggcaacagagtgagactctgtctcaaaaaaacaaacacacacaaaagagaataaaatggtgatatggaagaaatgttaagtgaataaagtagggtgcaaattgcatatgattcagattgattgatgggtggattaatagatgaatgcataaatagataggtgtgtatcagtcagcattctccagagaaacagaaccaataggaaatatatgtatgtatgtacatataaaggaattgatattgcagtcttgcagcagaatttcttcttttctgggaaacctcagttatgttcttaaggcctttcaactgtttggataaaggctgtattagtccattcttgcattgctataaagaaatacctgagactgggtaatttgtaaagacaagaggtttaattggctcacagttctgccggctgtacaggaagcatgatgctggccatctgcttggcttctggggaggcctcagaaacttacaatcatgatggaaggtgatggggaaacaggctcatccaaggccacagcaggaggaagagaatgaaggaggctgggagtagggtggcacacacttttaaaccaccagatctcatgagaactcttatcatgaaacagcactaggaggatggtgttaaaacattggaaactgcccccatgatccaattaccccccatcaggccccaccttcaacactgggaattacaattcgacatgagatttaggtggagacacagatccaaaccatgtcaggggccagccagattatggaggagaatcttttctatccaaagtcaactgattgctgatgttaaccacagctgcaaaataccttccctgcaacatccagatcagtgtttgattcaataattggatactacagtgtcttaaaatgcaggttttattattattcaggtatggtattcagatcaggaggcgactgccattgaaccaatggttatgctcacacatctcatgaggaggggtgcaccatgccacagtggggaccatgggaaggcacacatgggagcaccaggatctgtcaggaagcagagagagtgaggggaaaatgcagacaagagacttttttgtggtttctgcaggaaggaatgggtgagtcagggtaggcaggcttaggattgactcacctaaataatttcactgggctctggggcatgggggctgtccctagttgctgacagctggctctggagtgactggagaagggcagtagtaagtagccctgagtgtaagagcccagttttattcgtccattgtcacgctgctgtggagaaataccagagactgggtaatttataaagaagaggtttaattgattcactgttctggatggttggggagacctcgagaaacttacaatcatggcggaaggcacctcttcacaaggtgacaggagaatgagctgagcaaagggggaaaaacctcttataaaatcatcacccccatgattcaattacctcccaccaggtccctcccataacacatggggattatgggaactacaattgaagatgagatttgggtgggaacacagcccaaccatattatcaataaaggaggtgcttggggtgtgggctctagattcgttggtttgcctgtgcaaggcactctaagtgaatctcttgctatctctagaaattgactaaacttggaagagcccgtgcctccagggttagcaagtcctcaagatgttaaagcattagagtaaagaaaaggcgtgattaattaaactaagcatgataataggcaattagaaaaatgactagaaagcgtaaacagaattgttaacaatggttatctctcagtgagcagtgagattgtgttgtggagtattttcttttcttttctgtcatttctacattttttgtataatcatgaattgcttttctgatgggcatggaggaggaactagaataaatcatcatttttggtgttcagagggacaaaaccattaaatagctaagcagctgccctctagagttctgctcctgtctgggctggtggcaggtgacacaggtaacactatgtccctgtccagccctcactgtcttctctgtccccaagggccaggctgacccaaggatagcaataccttctccttccttgcccgggcactctgagaaaaagggactcccttagaggacactggggtgtttcttctgaggagcctgtaaggaaacctgggctttcgcagggctgtgtgtaagcgcgactgtgtgagtgcctgtacatgagtgtgtgagtgtgtacagctgtgtaggtatgtgtatatgagtgtgtgaccagacatcacagtgtgtaagtgtgtgtcagaaaatatgtatatgtatgagtgcacacgtgtgtgtgcatttgttagtatgtgtgtacatgagtgtgtgtgcatacatgtatgtaagtgggagtgactatgtgtgtgggtgttttggggtcagcaggcagggggagaagggtggaaggcaggaggaggcacagacacctgcactccagtgtcctggatgaactacggtcacagaacccaagagccacggaaggagaccagtctcagcgccctgctctgtccaggttatacccatgaattttcaggtgcataacccccagccaggaggtctgcatggctggccaaagaggcaggtctccactgtcactgaggccctcattacttctcaaccaggagagagggaccagccccctcaggggacatttggaactgtagggggacatttcttgattgtcacatgtctagggaggactctgatttagtagaaagaggccaagaatgctaaatgcccctcatagtgcaatgggcctgtggcagctaggggggcttggtggcagctgggggcttcgtgcctgctgtcttcccagagccctcactctatgcttgctgggccctgcctctggggaatgtcaattaaatgcaaaacaagacactggtgcgaaaacagtctccagtgaacctacccagcgccacgagcattgccaaggtgcaaacaaaagcacctgaggcaatcacacaccaggagagtccgcgcgtgccaaattcccacccctcccagccccacccacgtacatcttcctggacccagactgagttgacatgaaacagatgaaacaggcggtgggaggaggaggaaaacaaggtctgtctttcaaaagggacgtccttcccctctgcgatgagaaggcctttcttccggggagtcacccccaaagtgctaagccttctctgagcgggagctggcccccagtcacacattatctttgaagctgacctcccggtgctggggctgcgagggcttcatgggatgtcccagacccttggtgggaaagtatttgaagtgtctggtgaggctgagcttctgagcagctgaaagttctgcatcagacactcaggcaggaggctggtgtggactcctcaggtggggaaaggcaggggatggagaaaggcgctgagccttgtctgaagttgaacaggagccaaaatgaacaaggggccagtgggcccttcgaggtccttgtcccctccctgctaggttgtcaaccctggcagctgatcccccagatgctggggaggccccgggccccaggagcttctgattctgacgctcctgaagtcaaagatggggacgtgccccccaggccccctatccctgacaaaagcagccagagacacccactgaagggattctcaccctgtgggcccctcccctggcccccctgtcctccagggccctgccactcagggtgtgggccaggaaccagctttatcagctccatctgggtgctgggaagaaaggcagcacctggagccccaccccagacctgcagaattggaatggacatcttaacaagatccccccaccagaattcaggtgcacgtggaagtttgagaagcaccgctccactggagtaaataaaccctttgcctctctctgggaagaagatataatccctgtctggaataaaaatgcagtagagaggaaagtaacccaacgcagcattaactggcacaggacaagctttctattctgcaaaaatgcctcaatcctggtaactgctggtgagagttactttattttgttttattttatttattttattttatttttgagacagagtgtcactctgtcgcccaggctggagtgcagtggcatgatcccggctcactgtaacctccaactcccgggttcaagtgattctcctgcctcagcctcccaagtagctgggattacagacacacaccaccatgcccggctaatttttggacttttaatagagacagggtttcaccatgttggcagggctggtctcaaacatttgacctcaagtgatctgcccatctcagattcccaaagtactgggactacaggcatgagccaccacagccagccaagagttctaatatgacgagtgtttccattttggagacaaagaaattcatctgggcttgtgtagagggaggttatgagatttaatgaagccacacacccccgacaaacagatacaggactgggactcaggtctcctggaaggtcagcaggccaactttccaccaccctggtgaccatttatcagccaccccagtggaaggatgctggataggatggagagtcaggaaacctcaaattggtctcagtttggtccaggcttggctggataaccttgatcaggtcaattaacctctctgggggtgggaccacatgacctagaagaataatttctgccctgaaattatgtgcctctttcctctccagaggagttcactagagaatatttcctttgtatatttcaaaaggtgattcaacatatcaaaatgctgtttacatccacccattacataaaacatggcacttggatgtccctggaggtcaacagggaaggagagttagactcaggtttcatgtgtcactaacagggaggtgactgttgctcagtgctcaaagcaaggtcaggaggaagtctgtctcagaagaaaaggatgcttcccaggtaaccacaggtctcagtgaatgcccgctggccattaactacaaaataaacattccacgttggagggaagcctccccttgctcacctctcctctccctcctgtttttgttgcttttgtccctgtgacttttaaaaaaaatttaatgaataaactttattccttttttttttcagggtctggctctgtcacccaggctggagtgcaatggtgcgatcatagctcactgcaacatctgcctcttgggcttagacgatcctcccaccttggcctcctgagtagctgggactatgggtgcgtgccaccacgcctggctaatttttctattcttagcagagatgaggtttcaccatattccccaggctggtcttgaacttctgaactcaagcaatcctccctccttgggcttccaaagtgctgagattacaggcgtgaaccacctcgtccagtcagactttatcctttttttttcttttcattttaatccaaatcctgcacaagactttcttctttagagtggttttagatttacaaaaaataagtgaaaataacagagtttccatattacaccaccaccaaatttctcctattattaacatcttgttaataactcattagtgtggtagatttggtacaattgataagacaatactgatacactattgttaactaaagtctatagcttccatgagggtttcctttttgtgttgtatatttcatgagttttgacaaacatacgatgatatgtatccatgacaatatcatagagaagagtcttactgccttaaaaatgccctgtgctccacctattcaccctcctccctctcccccaccaccccggcaaccactcacctttttattgcccctatagttttgcctttttccagatgtcatacagttggatttttacagtacatggccttttccgattggcttctttcacttagcaatatgcatttcagttctttccacatccttttgtggcttgttagctcatttctttttagtactgaccctttcatcttttgatatggggctgaaggttctgcaggttgggccaggatcttcatgggagaccctccagtgtctggcagtgcagtctcagaacagctgcacacagcagagcctgcctccatcagctgagatgtgccaacatgtgagggacagaaacagaagaaacgggcccaggctgttgctaaagcccaaacaaaatgggtagaaagagctccagggagagcttttgagataggttcttggcatcctccctgcaagtgatgcagaagccatcacctgaatagaggatgatgacttgtgacaaggggacccctcagcacctccatggtccgtcctgctcccttccccctaactggggaaagagaattctgggaggagaaaacccaacttccaacccacattaaatcactgtcatcagggtctgagctcacccgcccatgagccataacagctgcccagaaactggccgggaaaagagcagattggctgtctcccagcccctcctctggtaggtggttttccagaggaaccagacagtgtcctgaacaccccccagcataggcagagtcagcttgatctcatctgtctaactccctcccgggccaggacaaaagtgtcactctgtgcctgacaccgaggcctgatttgctctcacccctgctgtccccgtcaatgactcccaactttcgaggcctcattcctacctttagtctttggctgccattatttatcactgcaaagtgaacagaggaacatgattttcactcaaggacaccacctttcaggaggaacttatccaaagttttgcaaaacttgggcagaatcaaggtctcacctccttcatcttggtggactcgagaaggtctgggctcaaagaatttctgcacaatcaaccaaaggtggggtatagaggcaggaggaaaacagaagacacagactgcccccaaaagaagaaaaggtcctttaaacaccatctgatagctcctccgcacagggtttggtggagctgtttttaaagtctacatttaacaatctggtgtaccccaggcctgtgtatctcagtcttaatgcctctgaagcaaaaactacaaaggtctctgatgtttcttctttcagacttttttttttccacgatatgaactttttttaaggctcccgcttcccggtgaactcgcctccatctctttctcttgctgaagctgcagatgtacattgtggtagtgtgaaaaaagctaattaaactgcagcggctcggcgggaggcacggaaggccccgcggagcacatgggatgattgatttgcactgtcacacggctctgctgggtgtcataacttagtgacaaatcaaggattacagtggcccagagtaactctcttcctttgttgttccatagacatcaaagcagccaaggatattagtgtttttaataagtagctaagtcaggagtagcttacagtttgaaattactctatgtacaattgaaggtgttgggggaacaggggtaaggaaaacaacagctcaagtgttattagttagatttaaaaaaatttaataaaataaaacaaaacaaaataaaatgcagcccatgcaccaggagcaagttctttgtaggggttgttggagatttttgcattatttgtgtaagccacgtggaggcctgctgtggtgaggcataccctctggaaattaggttttctagggacaggaaaaaaatgactatcaaagccacaggtctggggggcttcataagcaaatggcttcatcttaatcagcacagaaggaagctgggagggtcacagtgatgtgtttgaggacgaatatcctgttccccaacaattaggatcataaaatgattggggcaactcaccttatcttgaaagtacacagatccctgaagacagctgcagccaaggtttgtttttcttgggatatttaccttccaccacagaagagaggcctgaaaatcagagcaaggtgggaatctgaaattcattcctgcctactatgcaattatcatcactgtgttgctaatggtttctccctggatgggctcgagtcgctctggaagatgctgctggggccagggccgtgatgagatgttggaatggatggccacctcgctcagtgggtgcccatttctccttagtgattttaagctcggttagccctggacatggagaaataccaccataatcccaagatgcaccctgagatgcacacgtttccatcgactgtggcgcaacccagccctcttggaccctacccagttgggagaggagcaaaggtgactcaggacaagtctgtcaacctccctgggcctcggtttcttcattctgcataattggagatcatcccttcttcctcactcactaggttatgaaaatctaattaaacaacgccggtggaaatatttcacaaattcctaagcattatgcaaatcaatcagaaaatggaagcacaggatgaagtcatttcccacgcccacgcttcgctggtgtgggtggaggaagcctgtcatggaatcaccactgtgggcacccatgacagatttgaatctccagcagtattttcactgaaattcactttggtctatgttgtgcataaaatccatttggggttaaacaatggtcttgattttcttttgtgtgtatctatgaatctatgcgttcctgtttgcatcattgtgaacaaaacccaaaacaatttaaaattgcagtcatatgttcagttttcattattatgaattaaatgagggaatcggccagttttacgtaaaacagtgaggttgagtgaggcgggcttccccacacagagaggaggctgataaaacaacacccattgggggagatgaggctttaaggaactgatggtccttcaagcaaattcgcgttgactgaggagccagaggggacagttccatctgaaaactgggatccaggccccaactagttagtgccatgggcagtgccagcattccctgactctttctcctttggctttacctcaaacacatcacaattatgtgcatcacacttttgcctacttagggcagtccactatctaacaggagaagcaccctgtattcatcgatgcatcccacggcttgggctccttccacgtacgccaaagtactttgtttatgtggattcttatttattaaaattgcagacttactttttaagaaaaactaataaatttcttgtaatggttagagaagctacttttgaacccacccggacctatgttcccctttcctaactacagagagctttcttcaaatgacagcttttctggaaaacaaaacaaaacaaaacaaaaacaaaaaaacaacaaaaaacaaccaaacaaaaacaaaaacaaaaaaaacgctctgctttgtctggcaaagttgaatctgctcataacactttgaaccagcaattctgttccccagtgtatgtccatgtgcaccaggaggcaggacagggagtgttcattacagcatcacatgcaatagtgaaaaccagaaactgcctatatgcccatcagcagaagggacaaattgtggcattttaatacaaagaaaaactattatttagagaaaatatctaacagctgtggatatgaacatgaataaatttcaaaaacatgaaaaaatgatgaacaaagaaacacatgtcatagaggaagccatagcatatgtgtatgatttcattaatacaaagtgcaaaaatggcaacagtaaacaataaattgatgatggatacatatgtaaagagtgaaactgtgagaaggaagaagaaaggaaacatggaaagaggaagagagaaaggaaggaaggaagcaaggaaggaacaaaggaaggaaagaaaaaggaaggaaagaaaggaaggcagaaagggagaggggaagggaagggagggaaggaagcgagaagtgttctcatttctggggagaagtggtgtcctctcctaactcagagagttagtgtgttgggaatgagagtaaaaataatgaggatttcctaggaacgtggagtccttagcattactacacaacatttagatctatagttagtaggtaccaagagtttactagccagaatgcttacataattggcttattttcttcttcagtcctttggagaaacaaaagaggactaaggtggttcactccagagatgtattaaaaacaaagagcatctagaagacggtctagggctagcagatgttcaggatggcctcccacacttccacaatctccaacttgcatcacacactttatatattcaacatgctgctcatgaactcctcagatggggtgggggacatgtggagtgtataaggacaggggagaatggggtcttagttccgatacaagaaagggggtggagggaacaataggcggccccagatggtggatggtctgaggctgcccctttgactgttaatgtgtgaatgtcagtgtgagtctgtataagtgagagatgacatacacatggcatcggagcgactctcaacattaagtactgttagagattataaagctaacaaagaaggaagagatgtaccagttattcatattattcaccttaaaagccatctgcttatagagagactgggagtgaccacccaattacttaccagcatatcagtctattttaatcctctgcctactacttaacacttatcagtacctcacattttatgatctgtttgtgtgtttgtttacggttggattctccgaaccttgaacgtcgttgcctgccactattcccaccgtcaggaaagaagttttgttctctttttattctgtttttaaaaaatgtacatatctttttttcatttttcttttttttttttttttgcctcccaggtagctggggctacaggcacacaccaccacacccagctaattttttgtacttttgtttttgttatttatttatttatttatttttcatttttaatttttgtggttacatagtaagtatatatatttacacagtacatgagttattttgacacaggaatgcaacacgtaataatcacatcagggtaaatagggtatctgtcacctcaagcatttatcttttctttcttttcttttttttttttttttttgggatggagtctcgctctgccacccaggctggagtgcagtggcatgatcttggctcactgcaacctctgcctcccaggttcaagcaattctcctgtctcagcctcccgagtagctgggattacaggcatctgccaccacgcctggctaatttttgtattgtttagtagagatggggtttcactatgttggccaggttcgtcttgaactctcaagtgttctgcccacgtccgcctcccaaaatgctgggattacaggcttgagccaccacgcctggccatttatcctttctttgtgttacaaacaatcccattatactcttttggttatttttaaatgtacaatgaaattgttatttttaaaatttatactcttttaaaaatattttaacttttattttaggttcagggctacttgtgcaggtttgagttaatccgagtggcatcccttgaaggctctctgcattaggataatattcagatatccaacaactttcatctcacacagatcttcaagaaacatttttaaaaattaccaagtaagaataagaaaataagaatacccaacatactggtaacagtaattgtttctgggaaaacaagccaaggaattgaagagtagggatttaaagatcaacttttcactatatactgttttttttattttttttattttttatttttttttgagactgagtctcactctatcgcccaggctggagtgcagtggcgagatcttggctcaatgcaacctccgcttccccggttcaagcgattctcgtgcctcagcctcccaagtagctgggattacaggggcaggccaccgcgcctgactaatttttgtatttttagtagagatggggtttccccatgttggccaagctgatctcaaactcttgacctcaagtgatccacctgcctcagcctcccaaaatgctggaattataggcataagccactgtgcccggccactacatacttttttaattgactattttaccaagcacatgtatttccatactaaaagtttaccttaattaaaatctctttctcttaactctccctccctctgtgtcttttcctctgcctctgtccctgtttctttatgaattcaccagaatgaacatttcaaactacctcatttaaagtctcttggacctgactaatgatgtttcaagggttcaccttcaagtctttcctgcgttttcgaatttagataaaatatatgggtgtttcttggattttcttttaatctccttcactgcctttttccctggaggagaaaggagacatttccagaagaatcttgggaaatgatctgctagtgtgcccacatccagaagtgatggctggacttgttctgagcgtttgttgcggtgaaccgcagcaggataaacaaaagctttctcctctctcttgctgatgtcctgctgggttggacctctgcacctgagcacctcagcacgagtctccccagagcgggtcggtgccctcccgtctgcactggaaagagctccactctcccagaaggaaccaggtagaggggactgtccatcatccgtgccagttggccaagttcctccctcagcgaaatcaggaagctcataaaaagaccttatctctgggtaagccatgactcttcagttcccacccgcctggcgcctgggaaaggacaacaaaggggtgttgagaacaatgaccatctgtagagccgagcctgcaccagcagagtcacgggaaccccagggtctcagtgcctcccttccccggccccgtgcctggcggggtcaggtatcctccctggtagacaggcggccctggtggccatgtgtgctctcgggcttgtggtgttacccacatcctatcttaagtgttacacctctcctaaaacagactgatgagtggcctagacttctccttttatttcttagaatactcctagtgtcacagctctagagtaactgtgctatttcatttcttaccacccccttcctgaactgggctaaagacaatgtccagtgcaacatgtcacaccctgcccctcacttgccccctgctcaagtcgaatcctctgtccaccaagaccacagccctaggagttaggaaatggttccattttcctctgccttgcctgagccacacaattgcctgtaaatgccaagacatctagtcctctctcccatgaggtgtggtttccccagacccttcaggcatttacggtacctcagtaggtctccaaagtaggcctccaaactcccccaccagggccctgatctccgctgagtaacttcctaatcttttctttacaattcccacctgctatttcacctgtattttattcaccaacctgagatataaatagataagtgttttatggataaagagactaaggcacgatttgtctaaggtcattacgcgttgctgactgagagagaactcaacacctttgacgcctaacctaaggctttttcaattctattaccattttgggcacatgtcactagatttcggtcctagtccatgtctctattcacatcatagactgctagggctgggaaagacttcagagtgtatccttgtctcccatgctcatggtgaaactaagccccagagagagaagtggcttccaaggttatgtaatgagttggtggccaagttcagatgaagtggttgggccagtccccaactcggcctcatgccagacctcccagctccctgatgccaggatccaaagccctttcactctgaaccctctcctccccttcctccctggcaaggtcagcaggtttgccaggcagtccttggcctcctggcccacaagtccttctgcatggtgcttgttggtgctggtactctctgaagggggcaggaagcagggagaaagcctgggggactcctggggtccagggaacagaaggggaagaaagcgtgaggtgagagagataggaaaaaggacaaaaattgcagtcatcagggacatgagactttggcaaaatccctcaccatttatgctgattattggttcagtccagaagaactaataaaatgagaaaagaaaataaaaacaaacaaacaaaaaaactgtatcggttctttaacaccaccacaaattacaggtgatgaagcagaatgctgttccctgggtctgactgccgtgtggctccataactgtacacgtcctcaagcatgtcagatggacttgctgcacgctgtactttagcagaatggtaagctgtatcctacctgttcagtcttccaagcaggttgtctcggcaacatggctagagcttcagggttagaagggacttgaaaggatagacccctatttaaaacaaacctaaggcaaaaaatagtgtccttgagttttgcctgtggctccttccctttctggtttctttcttttttttttttttttttttttttttgagacggattctcgctctgtcgcccaggctggagtgcagtggcgcgatctctgctcactgcaagccccacctcccaggttcacgccattctcctgcctcagcctcccgagtagctgggaccaaaggcgcccaccaccatgcccggccaatttttttgtatttttagttgaggcggggtttcactatgttagccaagatggtctcgatctcctgacctcgtgatctgccctcctcggcctcccaaagtgctgggattacaggcgtgagctaccgcgcccggccccctttctggtttctaagaggccacactgagtagccagggggcctgcttaggtgacttatcagccctgagttaagttctagagaagctggggtgaagagcaagctgctcactgacctctttcgttcctgagcaagcggggtgagtcaccttaaactagggacaggagcaccatgaagccaggacggcagggacacggagttggaagcatgcagggaaaaggacactttctagcttttggcctggaggttgtaagtttagtggatttcctcaccttcctttgatgggaggtgtgaaactgacatccctcccaaattgtagcagctcttcccaaaagctgcccaagctattatgccgcccagtaaacacatgcttgttttgcaaacacagctttaagacttatcctcccgcctccccttctaccagaacgatgcccccaaactctctcatatgtaaatctgggagccgtcatataaacctagcagttatttccctggagagtaaaaaatcttgtgcagaaaaaaaaaaaacaaaaccccacctagagggaaatactctaaatattaatggtgattttctttctttggttggtgggataaagcctaattttttcccatctacttttttcaatttctaaatgggctataatgaatatataatacctttatgctataaaatataaactaaaatttttagcaacactaattagcactgtcgtccatgtaacaagaatacagtgagctatctccatgcagacagggtctcgagagggaaagttcttccccgaaggaaagcaggtcctgaactatatccccagtgccttctgtgaaaagctcagtttaagcatgcttaaagaggttcacatccttcaagagcttctcattccctcctgacctcacagagacagggccatatggggaaagacaaatctcgttatcctgctcagctaaacggtgagaaaacagagactggtgcaggcacccgtgttttactatgaagtttcaacaactgcttctaagtctttctctggcttgcttctctcccccatcaggtataaatatcctcagaaaagaaataaatatctcttcaggtagctccaatgcagtaaataattttaacctttaatgtcctgcacgagctctgatcttaaattctttaacacattaaaagctttagctactttaaacatagacttaccaggggatttctggagcaattctactcctaggtatataattaagagagttggaaacatacctccacatgaaagcttgcatgtgaatatctatctgtagcaccattatttatcagagctgaaatgtggaaactacataaatctccaccaactgttaaatgaataaacaaaaaggttgcatatcctcacaaaggaacattactcagccaccaaaaggaatgaagtacagtctgtcctccttatctgtgggttccacatttgtgaattcagccaacagtggatcaaaaatagaaaaaaaaaaaccagaaaatgaaaaaaaccatgaagctctaaaatgcaaaactgaatttgccataccctaagtactacactgaatccaagtgaatgaagtgatgtgtagccttgtttcggggtatttataagtgatctagacatacatgagacgatgtgcataggttggatgcaaatattatgccattttatattagggacttgggcctctgtggatttgggtttgtgaagggagtcctggaaccaatcctcctcctggataccaagggatgactatactgacgcgtgttagaacatggatgaaccttgaaaacattatgctaagtaaaagaagccagtcacaaaaggccacatcatatataattccgttcttatgaaatgtccagaaaagggaaatcgatctacagagacagaaagtagactagtggcttccagggagggattaagtggttgagggaagtagggagtaataattcaagggactggaagtttctttgtcatcattgatgaacatattctcaaattgatcgtgttggttgcacaactctgcaaatatactaaaaagcattgagatgtacactttcaatgggtaaattatatggtaggggattataacttgacttatttttaaaaagcttagctagtttattcacaaataaatcacatgcgcacacttgcatgcaggttgtgtagcagctctgaggcagggccagggagaaagtcaaggttgagcccagctcctgggcggccagatcaacaatccatgcagaaagcaaacatccggcttaggatccaggaggccagagagatgtgccaagaagtcagagcaggcatgggagggctttgcagacatcctggaaacccctaagtcaggtgcaccagtaagaggtgggagaggagcaactgctcagaagaaaccagaggttgcaagaggggctggattcttttctcatgaaaagcagtgcagttccctggagccatgctggcccatgttttttcacctggacttgctttgcccaggggcttttttgctctggggtcatgctctgtgccctagtttcttggtgccctgggtgggttcccttctccctggaaggccaacacgcaaaagggaaggggcagcagtcagatcacctgcatagagttttgtgagggtttgctttatggatgttgatccctgtactttgggacattttagtccttgaactaaattgcaagccagggacaagaagttctttgtaccaggcaaggagccgatcttgagattccctattttccattagagaaaacaggagactgattcaatgtcacttccacacacaaaacctttgcacaaagtttgctgctatggggcagagaaggccaaggttagaatcaagaggaaaaccactcactatgtgctaggcactgtgctttgtagacatgaactcatttgagcctcttaattatcctatgataattaagcttcagtttcctcctctgtatagtgaaaaccaggcctcaagcctgcaagttatttgaaagagttaagtaaggtaatatatgtgaaattttccaccactcttaatgcatcagaaatcttgggtcttatcattttacaagatatttagatactgtaggcatgctttcatttggtcctggctggaagacatattatcgatatattatctccttcttacagatgacaaaactgagatcaagtaaccaacccgtggctatacagaaaactaaggaatcatggaattaaaaccacctcaccgagtgcccctcccatcaccaggggtctcaaagttcacttacgtctgaaccatgtgggcacctgtcaaaaacaaagaggcccaagacctaccccagacctatggaattcaaatccccagagtggggcccagccacctgcatttttaaatcttcctcaggagattcacgtgcacactatagtcagtctctgcactaacaagaagaactaggcaagagaaaacctaaaggaaaaagaaagaagtaaccagaaaaactaaagggtaaagaaagaatctagaagatacaacctgcttatatattacagcttttacacagtttttaccaggtgcagggtatggtggtaagtgctttgtaagtcttatatgaacttagttgagtctcagagtcaccctatgacataggtgctattattagccccattttacagatgagagaattgaggttcagagaagtgataagttatttgcccaaagtcacatagccagtaaagaaagacaggagataattttttttttttttgagatagagtttcactctgtcatccaggctggagtgcagtggtacaatctcggctcactgcaacctccacctcctgggttaaagccattctcctgactcagcctcccaagtgctgggactacaggcatgcaccaccacagctggctagtttttctatttttagtagagacaagttttcactatgttggccaggctggtctcgaactcctgacctcaagtgatccacccgcctcggcctcccaaagtgctgggattatccagcatcgtgagtcattgcacctggccagtgagagagaatcttaaccaccttgatacacctgtagagaggaaagtgagccaagataatgagaaaggagaaagggcaagaaaagaggcaccatggaaagctagcatgaagcaaagctgtgtccaggtcccaatctaagtcttcagaaacccacctgtggacttggcaagtttgagaatgggacttgggtacctgtaaaaacattcatggtgtgtggatggcaaagccagtccaaatgcttccctgccacttggcggggggcaccccccacattggctaaagtggtttgaatggtgactccaaactctatgtccatgttctaaccctcagaacgtatgaatgtgacagtctatgggaaaggggtctttgcaaatataattaaagatcttgatttttgaaattatcctggattatctgaatggactctaaatccaataacaagtgtcctcataagaggagaagacacagagaggaggagaagatcatgtgaagatggaagcagagactggagtaagcagtcacaagccaagaaatgctgaccaccccagaagctggaagagacgaaaggaaactcctctggagcctctggagggagtgtggccctaacaacattttgatgttgaacttctggcctcatgttgtgttaagccaccagattctggtcatctgatacacgatatagcagccccaaaaaactacacactgagcaatgttccattgataactgatatatatatatatatatatatatatatataattttttttttttttgagaccgagtcttactctgtcacccaggctggagtgcggtggtgcgatctcagcttactgcaacttagcctgtcaggttcaagtgattctcttgcctcagcctcccaagtagctgggattacaggagtgtgccaccacgcccggctaacttttgtattttttggtagagatgggggtttcatcatgttggccaagctggtctcgaactcctgacctcaagcaatccgtctgccttggcctcccaaagtgctgggattacaggcatgagccaccacgcccgcctggcctgataactgatttagtggacactgctgtttaagtctgcctagcaaccctttttcattttctctggttataactcctccctttccctagacacctgtttcccaaaacctcctgcatgtgattctggtggcccattctagacacacgaagtgccattcgtccaaaactggccagtcagagaaccccatctcttcagctacagtgattggtccaggggtggctcatgacccaggctgggccaatcagagtctttctctagatttttgtagaagtgagctgtgagagttatacttctcttccctttggaattgttaagttgatgcaccactgaagggcatgtttttctatatggagaaagcccatccatgtacagtaggcaggaatgaggccaatgtgcaaacggagacagaaatgagccgtggagttagagcgtgagggaatcctgatagtgtctaagttttcggagcacctgtaacatagtacacacccattattaagtgtgaaagaatgtttcgctcttaagtgaaacaatgttttggcttaggctaccttaagttagcttcctgaccttgcaaccatcagagcctggactaacacaagggacttaaagcaattgctgttttctccaggcaaaacagagggatctgaggataaactttactgcaccatttgcatctcatccatttcagagaagttctgaggataagatcgagagctagcggtgaagaaaagatgtggtgaagaaaagaaatgagaaacatgcttgagaaaatcagtctcctttatcttgatagcatcaggcagaatgtcctaaagacggaatggggaccatttccaagcagaagcaggttcattctcatttggcagagcatggaaaagagaaggaaatgaaaagattcagacggggagtcaagtcaggcgtgggcagagaggtcctgattccccttttcataaccgcacgaagctacctatacatccaaacaccagcctcaggatcgcagtgacatctgaaacttcatttagccatttccttccctgttcaagtctctttgggttactcagcccatacattgctaatttttcatcttttcaaagctctccattgcatttaaaatcagaatgcatcctattcatcacttctgaatttgagggggtggattacagaggtcagcaggccctttaatatagaaagtaaatgagcaagcgaagccgtgcgtgaacatgtgtgtgcatgtgagcacacacatagcttattatttcctgccttaatccacttttcagctccactgtgcaagatcacaagaaagacttggacagtacctcttagaaaggttcctggcttctccttcaagaagcttcttcctaaaagttgccttttgtagttcaccaggtctgctgtgcaggcttcagccaagctaattactggtcagccggcagtcactttgaactagtcacacaccagacgccctccaaggatcttgtttgctaggtgactgttttcatacagtgcctattatatcttcacgtggcaaagggcctttctctctcacttgaggcagagcagagaggaagcccctccaattaaagcagggacaaagaaatggaggaaggctggggcacatggtcttctgacaaggctcaacagaaaagggggtcacagagaaactaaatttggctgctataatccacttaaaggaaaaactaaatcaaaggaagagagtgtgtggaataggggtgtgagccattggtgtcctttaggtataaccactagatttccaacctgttcatggccacctgtagagttcccaagggagttgtgtataggtctggacgtttggatcctattcacctaaggtagcttagagtgggtgctaggaaaatagaaaagtgtcaggggtcattccgtttaccaaatcaggcctttacaagataagcaatagggaaaaaatagtgaagaccaaaaagttggtggcattcagtcccaggctgttaataaattcgttataaatgtgaccttaatttccgaaccaaaaatgaagacaaatggtcttatgactaggagtatacatggaattcatgtaatagaatttttaaaatttgactgcccctgaaattatagagtagtagttctcaactaggggcagttttggtgatgtctggagacaattttgattgtcatgactgggaggatagggtgtgtgtgtagtattggaatctcttgcatagaagccagggatactgctcaacatcctcctaggcacagaacaggctccaacaacaaagaattattctgtcttaatgtcaaatgtgccactgttgaaaaatcctgagtacaggttgtataattggcaaacccatcagagccatctgatatggtttggctgtgtccccacccaaatctcatcttgaattgtagctcccataattcccatgtattgtgggagggacctggtgggagataattgaattgtggaggcggtttccccaatactgttcttgtggtagtgaataagtctcacgagatctgatggtttgttttcccttttgcttggctctcattctctcttgcctgccaccatgtaagacatgtcttttgccttccaccatgattatgaggcatccccagctatgtgcaattttgagtccattaaacctctttttctttataaattacccagtcttgggttatttcacactgttatcagcagtgtgaaaacagactaatacaccatacaagaccgttttaacccctaggcagtatattcatcttccctaaattatgagtgcatttctcactaaagaccttggatgcctcctctctgaagagtaagatatttttcttacaaagtctccttttggaaatgatgaagccaggcacattttaatcatgatttatctcagccccaactacatcttattgaactgagatggacaactgacccaggctatgccactcaaattcttccaccaataatttatattcacacagggtctattaattaggaaaggataggatatgctgcagcagtaaacaaccctcagatcttagtggattaaaaaataatttattccttgctcacctgtttattcctggcattacatgcaaaggtaggttgccaagtgtggggtgggggtgggagactttctctcttccacataatcactcaggccccaggatgaccgaggttcacccatcttatgacactgtcatctctacatgaagcttcagggttcaccttagcagaggaagaaaccacggaaggggttcatgctggctttaaaatctttgactggtaagtgacacatgcttccttcctctcacagcccattggccagagctagtcacatggccccacctgcttgcaatggcgtagagatgtgcagtcttcccaagacccaagagaagtgaggagccagtgagctgtgagaaagtgggctgcaaggcctgtagtaccagggcttgagtggacattagaaggagccagaactgaggttacaggagagcagacctcaggagaaaacagaagaggctggtcagaaaagagaaaatgaggcaggtgtgcagggagaatcagagagcaggaggctcctgagagatccagaaagtagatgcttcagtcttgggcagcttcctgctctccaagtagcctgctatgctctgtttcatgaaaactctaggtcagtacaccaacaccttgctctgagccagcatgaatagatttctcttccttgctaccaaaacagctttgacccatgcttgccatttgtccttctttaatatgtaattccctgttaagattgttgggttgtggaaggaagctggactctcacactaatggaactgcccaaagatgacgaaactcctggggtgagcttttcagaagagcccaactttccaacagccccagcctaacacagccaactgagcccaggcaggtagcggcccctgaggcaacttaagaggctcagaaggacaatccctatgtcccagtgccacccccacatccaaaagatgctgggcttttggcctgctttgtgccatggtgcccttctcagaatgatgcttttaaatcatttaaatatttttaaatgcaaaaaataaaatacgtaggattacaaaggaaaccaattacactgaaaagcagttaaaatattttaaaattgagacatagtattatgtgcacttgttagtattgcatttagaaactctagtgacaggtttatacctatcataatttcagtaacactgagaataaataacgtcaagatatttgcaacgactgtaacttcatatgaaaatatttatttgttttgatggtaacaaaatcaacaaaatcacagacacttttactatgtaaatgtttattctgtaagtgtttattatgtgttattttactatgtaaaacagtaaaaaccattttactatggtttgttgcctgcatctataatgaaaacgtatgccaaatttccattaaaggtttgtgaatggaatgatgtattttattatttagtaaaaaaaaaaaatacatattttgttgttagtgaaaataaaaacatattttcccagccatgttcatggaccccttgaattctatgacccgttggccatccataaaccacagattgagcatctctggccacaaagccccagacaaagctcaaatagattttctgagcaggaaaacagttgatgaagaggaaacagaaattatttattactgtaaggctaagcaataaacactaaacaatgagtgacacctaaggcagtattagttgatcagcttagttcttgtcaccctctagagacttgagtatgaacagaagaggtaagtcttaacaagaacttggtgtctgtagaggatgctaaatcagaaaacatgagcgtgggctcactggggtggaacagccactgcctgcagggctatcttcaggagcagggacacactggaagtgccaccagaccaaaggaagaaatatctgccactaggcttcaggcctggccactggaaggaaatgttcaaaatgttcttcagaaattaaggtgataactgaggaaagagaaaaaaaggtggggtggtggtggtgggaagtcaaggcagatggaatgaaattcatgggaacaaagtttgtagggtgggggtggggaggctgaagtcaaatgcctcaatcactgcaacccaacctcttcgttctttctgtggctgaaggcacttgaaaaaacaaagattgtatgtgtttggggaagaaccgaaatttttctgaacacatttacaaaagaagaaacaatgaactgggttctaatttcccttttgcctccctaatctgctgggccatctaagtcaagtcttttcatctctctgggcctcggtttgctcatctataaaatgggagagttagactagataatctcatgggcaaccattttacaacttcaggatcagccatcaataccctagcactgtgattcccaatcctggctgcacatggaactctcctggcgagtttttttcaaacaacaaacaaacaaatactgatgcttgggtcctacttccaaaattctcatttaattggtctgatgtggcttgagcatgcagagttttaaaattccccaagtgattctaacatacagccaaggttgagaaacagtgtcgtagcacaaatttgttaattaggttgactctactcacttgggaaagcacttttagttgggtagaggacaaaaatcagacacctgggacagaccaaatgttcaatagactcagtcatattgagacatgggacccagacccagagaagacaatggacatcacgtaggggtgagcagggaatgaggtagttttggcttggaatgcaaggaatgaatctgtcctactagctgaatgaacttgggccagtaacttcctttttctgaacctccattttctcttctgtaaaatgagccctgtgtagaggaaggggaaaccaacatacgttaaatactccctatgtggcaggccctgcctgaggtgcagtacctatattatccaatttaattctcacactgtatttgacagatgaggaaactgctgttggagaggttaattaacctctttccccatctcattgagttactgcagggccaaatgagaacaagtgtctgaaatagtgttgccaccttccacaaataaaaatacaacatgcccaattagagttttagataaacaataattttgttagtctatctcaaatgttttgtctgacaactcaagttggaaatcattttatcaactcacaaagtatcatttagagttttattgggttgtttggcttactagcaagaaatttttcagtattagggatattaacctcctgacatgtgtcctaaacattttctctagttgtgtttcattttttactttgttttcggtgtttgttgtacagaagtttttaattttttatgttgccacaagtcccaatctttttctttatggcttatggcatttgtgtcatgcctacacgtttccacccaaatattgtacaagtattcatcagtgctttctttgagtgctttcttttacaacctgattttttacatcgaaagcatctggaatttatttggggggatgatggcgcttccccccaaatggctagccagttgttccaatagtgttcaataaattatcttttcccttgcttgtttgaaaataccctttatcatagactgaattctgagatttacatgttgatatttctggaacctctaatctgttccactactttgtcttttcctttctcagtgacactattaaaataactgcaattgtatagcatgttttattatctggggtggggggagggggctacttcttccttgttttccttctaaggatttcctgtttatcctcacctttatattcttccagattaatttttgaattatttttatcaagtacccaaaacacttgttgaggttttgattaatgttgggtcgaattttcagaatagttgagagagaaaggacctcttaacaataccgtatgtgcctatccaaaaacaaaggatatctctccgtttagtttcctctttatgttagcagcattttcttcatgtaagttctacacattcttattaaatttattcttagcatttgatatttcattgatatattctatttatttttgcacaaggtgtttatcttttctctctctttccctttctttctctttccctctctccatctctctcccttttctttctctcttcttccttccctcccttctttctctctccctttctttttctttcttcctttctctttcctctctctctcttttttttttgataggttctcattctgttgcccaggctggagtacaatggtgtgaagcttcaaaatcctgggcccaagggattttcccgcctcagctttcagagtagctgggaccacaggcatgtgccaccgtgcctggctaacgtttttattttttgtagagatagggtcttgctatgttgcccaggctggtcttgaacagcaatcctcccaacttggcctcccaaagggctgggattacaggtgtgagccaccacagctggcatgagtagttttattaatgggaagaagacaggagtagcaaagagggaaagagagataaaagcaaatttggtcaacctcagagtgttgcctttatcttcccaagaaattctagggaaggttcaattcatgatggtgacacccattaaaggaaagatggtatgtttgaggacaccattttaaaaactggagagtcagaagaaccagatacaattctcccacataattctataataacagactatttctcagctaaggagaggcccggagcgaaacaacctggcccttcccacaggcgcccgccatctttgcccgaccacgccgggcatcccgttggctctcagtgaaagcccagccccttcctgctgaggctccacttccggttcggaggagccagtgttctctggaaattctctctacggtttttcctctctgggcttatttcatgataatttgctcctctgaagggagtctggcatctccctgacaaacacgtttgctgaaagatttacattttcgatttcctcgtcgcccattttctgactgcatacataaaagagaattgtaaatgtttagaaaaatcaaagttcttcttagacacctgcagttccacccagttagttttctcgataatacacgccaagaaaaggctgaagaaatgaggtggaataacctggccattttcttgctgaggttttccagactttatttcctctcattcttcgagtagcttcaaattctcagggcagttgggaagcttgtcagatagagctccctgctttcctggggctagaggtagtcctgggagcctcctggtcactcctcgtgggtataagtgccaggggaggaagggcaaggacagcagccactactgaggcttggaacattggcctggccctggttaggggctggcactcggcatgtctactagacgctgccttccccacaccacggtgtagactctcttgccagaccctgcttctgtccgtccttctctgcctattcctcttctttctctctctctgttttttctctctctcccttccttcctctttttctctctcccttccttccttctttcctcccttccatcctccttcctctttctctttcttttctttctttctttctttctttctttctttctttctttttctttctttctcaccctttctttcttctttcttttcttttctttcttccttctttccttcctccctccctgcctcttttttcttttcttttctcttctcttctcctctcttttcttttcttcttttctttccagagtcttgcgttgtcacccaggctggagtgcagtggcatgatcttggctcactgcaacctttgcctccagggttcaagcgattctcctgcctaagcctcccaagtagctgggacgacaggcccgtaacaccatgcctggctaatttttttgtatttttagtagagacaaggtttcactatgttgcccaggctggtctccaactcctgacctcaagtgatccacctgcctcggcctcccaaagtgctggaattacaggcgtgagctgccgcgccgggtctctgcatattccttttctttaatttactacctgtggggtgccagtggctctgcagagggcattcagggctgaggaaggctgcaagctcttgacaattagcaaacatttgagtgttaataaaacatttgagtgttaataaattcacactcagaaaaagcataagctggcttctcatttccattttttcagatgggcaaacacaaatgctgagaatcttaaggctgtccctaagaagatgtggaaggggaatgcacttactggtctcaagaaggaccagtcctagactcatgaccttggcccattgcagggaacacttgctgagtgagtctaggatttctaggctaagtgacgcttgtctgtggaacactggcgacgaaagctggttgcacaactctctgcaggctccttggacagtgactttcaaaccatcccaaccaagattgctaagagaaccgcactattaggtttcaagttcacatcacattgccttaaaaaccccatgctgttcctacgaccacacctacaacttgcccttgaaaatggaaaactccattccataaaacaggtttcttctttcaagtgccccaccaggacccttcaagagaagtctgaactatcatgaatcaaaatttcccatattttccacaccccagttatgaaggagtggaccacattatgatttccccagggcttatataagacatatttctatttttcactttccatttaaaggaaggacccttttggtcatcttaatcctctgggcagagacagaagaaaagaccttattctccaattattttccctgttagacacagttcttttgaatgttacaaagaaaagatacagaccagaaatatctttccaggaactgatttcaaatgttgattccatatacgccaagagactgctggcatccacagctgcaatcttcattgaataatgcatcaggagacaattagcaagagcttgagactgttttgattgcatggagagttggtttgggcagtttgtgctataacaaggtctcgacagtatagtaagtttggaaacaccaaagttaaagaaaagaatgaattctggacaaggaccccactcccatccctgggacattcacagtgctcttcatttttggcctacttatgtaccattcatgggtcccaattttgtgcaagcttcttatccttcaacctagcctataaaaatgagagcagctgggaattcgaaggcagggtgataggggaaacaatttcatggttcctctccctctcccaacctcgtaagtttttattgcttcacagttcatgatctcgctctttcccccacctctcaccactatccttctgttcacacaggtcctatgggacacttaatctggagggggattcatgttcctttggaatagccactggatgagaataggctcaaccaaaggcccagctaggaatatccctgccactttcaacattccctccatctggcttactatggagcaatttcaaggctcgccacagctaaggcttgggttgtttccttgatttctgcttctcatctgttgtacattccccaggaacagtctggtgataagagtcaggtagcaacaatgcagtgagtctctgagaccaaaagataattgaaaaatcccagtaagtccattccctttggccttgagttcacatatggtcaccacattagagaccttgtccaaaagaccagcttgggacatggggtggagatgatttctgtcgttaacacagccacatcttcccccaagtcaatgggcaatcagagctctgtgtactctgattcattgcaggactgaccatgtcactggttttaacccaacatgatgtcctttctagcatggtcctcactctaggagataaagtagctgtcttcatgagtgattgcttccagacccaatgaagagaaactcatgtgtttgaaatgcctgccattcttctccatttcaccataaagtagccaacttaattttgcacaatactgtttgataacaaccacgtgtgtgtcttctatatttatatactcaggaaaggacctacttggtcagtgtgagatgatttcacaagaaaaatggaaccagatgtgactcctttttatttggctcttcaagctcaagcattctaattccagggtcagcctttacacgggttttcggttaccttgcagaagaggatccttttacactacagcgtttgcttttccaaggtccctgacaagcagaagtaggcaaaagattttagggaatttgttctcagcttagcactttccaacatttccaggcctagagattcagtgggacagactgtatcctcttttggaataatggaacatgcctgttcagtagtagacatccccacctttaattcaatcattcttccaacttcccagaatgcacaagcactttgggcctggaactcaagatcagatagtgctaaagtgactcattcaaaactccaaagccaaggagtgggcaggactgacatcagagaaggtcaggctttactcctttcatcttggttcttcttttcctaaacaaacaaacaaacaaacaaacaaactttcatcccaacttgtgctggcaggcctgccatgtacagcggtacagtttgtgcactgcacaaaaatgcttactgccaagggagcaattaggggctgaaatgcagtccatgctacacttatcaagacatgtaccccagaaagtgatacatcttcttggaagaagaagcaccccccatgaaacgcctccccgccaaaatattaactgctcaccaagttggcaaccgtgtgcgtacatctttgcagcagtgcacttttctaagaagcagcatgtgctagtggtatcttgcatactggtgacagcctgagatatgaataaatatgcaaactgcagaggatgtgtcatctagtcctgtgtatattagtactgctcaatgagccacactcagccccaagataagtcatctagagaggctttagatgcaggataaccactacatggcacttgtgccacgactgctacagcagatgtgactcataagtcctggaattctttcatagcccaaattcgtcacaatccttttccactcagtggagcactctgctcaatcactaccaattaaatagagttggcattcaagagaacacctatctgccatctgccccagctagctcttgccacaataatgctccataacaaattaccccacaactcagtggctgaagacaggaatcatttatgtttattctcctatctctatgggagctgtgctttggctaatcgaggctgacaggccaagagtgctctgcttcgagctgccgtccagctgggcttgtcttcttgctgtgagttggacttgagtctgctcaatatgtatccattctggagtctgtgctgaaaggttgcagccagccaggggccattcttctcatggcaagagaagaggcacaagagggcaagcccagccacacgagcacattttcagtctttgcttatgtcgcatccactaacgtctcattgaccaaagcaagtgatgcagccgagcccaaaatcaaggggtggaaaggatgccctctcactccaacataaaggccagggtgaagaattgtgagaaaggctgggcatggtggcttatgcctataatctttgcattttgtgagggcaaggcaggaggatcatttgagcccaggagtttgattccagcctgggcaacatagtgagaccccatctctgcaaaaataaaaaaattgggcatggtggcacaaacctgtattcccagctacttgggagactgaggtgggaggattgcttgagcccaggaagtcaaggctgcagggagctatgatggtgccactgcactccagcctgggtgacagagtgaggccctgtctcaaaaagaaaagggagcaagacttggagctgccacagcatctgtgccgtaggcaaaggggcaggagaagtatcaaaccacatttggtgtgatgttccctgcttggctggtgctcctataaagctgtcattaaacccaccttccctagacagccaatcaacctcttggcctaggaagggaaataacagggaaggctgaacttcagagcccaggatgagggatagagtggctctttataaagtccagctggtgaacctggtgaataataattaagctggatctgaaacaggtgtttgctctaggaaatgggtccacgtaaataagtgagagggccaggtggattcagggtgctcaagcttcagggtgtgtgatttggaagaaacaagagagtgaaggaacaagagcagaagtgatggcggtttaggacagagcaacccagagcttggaaacccttgctgggccgcgcccgaagggcttttcattttcactcatcaaaaggaaagcatcccttcaggccacaacatctctgatgatggtgaccgtcatcaagggttaatctagaaaattacagagccaatgtcctgccctccaggacttcacaatctgagatggaaacacaagcagcaactctaaggagtaaaatataaacaaagaaccaagatgatgtgaggcagacaggcggcaaagggagttccagctgtagagaaggaaaagcagggatcgaacccagcaggctactgggaaaaatgggcattcagaaactccttacgggagtgctgcgcaacccgaacaaggatgtgacttaacagaggacaaggaagtagaggtgaggggtggggagagaggacatttactatggatctggagagaagagagtggagggaaggggctggatcatgagctcagtcatgtgctgctcaaatgatggtcaagagctttgcactggtctgacaaggaggctttagaagggttgtaaggggctgggcatggtggcttacacctgtagaaccagcactttcagagggcaaggcagagggattgcttgaggctgggagttcaagaccagcctggccaacatggcaaaaccgtgtctctacaaaaaatacaaaagtcagtcaggcatggtggcatggacctgtagtcccagctacttgggagactgagatgggagaaaacgcttgagcccaggaagtcgagactgcagtaagccatgatcgtgccactgcactacagcttgggcgcctgagtgagaccttgtctcaaaataatgtaaaaaataaataaataaataaataaataaataaaagaagggctgtaaggatttccctataagaaaagtttagctgcctgtttaaaaaaaaattacaatgctgagtacaaaacaaaaaggttgacaggaagacttgttacctcccaatcggacatcttagaaaagggaattaaaaagggaggaggtcaccaggtctgcataacccccacccacaaggacaccaaaccaaatctaacccgcctgtatcccatcctaattgtgtggatccattaggccaggctctgtgggaagtactttatatattaccacaaaactgtgaagtaagtactattatcatccctttctacatatgaggaaactgaggcttccaaagtcatgtggttagagaatgctagtgctaggagttgaacccaggccatctgaatttagaacccacatccttaaccactgtataatacaaaccctaagaggcttcacttgcttaaaagacacaacagaccaggccgggcatggtggctcacgcctgtaatcccaacactttgggaggccaaggcaggtggatcacctgaggtcaggagttcgagaccagcctggccaacatggtgaaaccctgtctctcctaaaagtccaaaaaattagctgggtgtggtggcacacacttataatctcagctactagggaggctgaggcaggagaatcacttgaacctgggaggtggaggttgcagggagccgagatcgggccattgcactccagcctgggcaacaagagtgaaactgtcttgaaaaaaaaaaaaaaagacacaacagacattgagtttactttagctaggcccagccagcaactgtaggacgtgtttgccaatcaagatgccaaaatatggctaggaagttttcagccacccagaaaattgatgtggcctcattttccacattgttctgaaaagcatgcttactaaaacatccaagacccttgggaatgttcttttatcaaatgggtcccaggtttttccctctgtgctgcaaaatcctggtgtgttttctttaggagagaagtaaagtgttagtgacaggcaaagagaggctgagggaaatatactcttccctttcaagccaggttaaccaagtctggtttgtaggcaggtgaatcattgattttcctctcttctccagagagcactgccatagttacatggataaaagccgaggaataaagacagaattgaatggtctaggttgaaaggaaacttttgaaacaggttagaagcatccagtcgggggttggtttgcagtgtgaaatgtctactatccaagcaagatgcccaacattgtttagttgtggttgagagagaggaaaggttacataattatcatgccttctgaaagcttaaaggaaaccattttcttttgtcttctttgttgttacttgcagcttgtacccgctgttctgcaagtctgactttgagcctggatttttctgaaagagtttagggtttttgcttttataatgccaaacttcacacaacccacagtcaactttcactgatgctgaggctcccatcttgcaaagaaccgtctcaaaatcatcagagagggactgacaatgctaggacaggtgggtgggaaggaagccactttgcctggatgcccggtgaagcatgacctgctctgggaccctgggaaatattcttggagaaactgtcttccagtagagatcagtcaagacattatcacatctttcaagggaggtaattcgtctttggtaaaaagaaggtagaggaaggtggtgggtgggactgcaaaataggaaacatcaattcacatccacatatattctttgaaggccagaaaatgtactaaataaagcaaagaaccaaatgcattttagccagttttcatgagaacctcaagaaacaatcttagcaaaaggtaagaaaacaaatgagcaaactgggttttctttccaggccaaagaaccatagatttttttttttttttttttttgagatggagtctcactctatcgcccaggctggagtgcagtggtgcaatcttggctcactgtagcctccacctcccaggttaaagcgattctcaagcctcagcctcccaagtagctgggattataggcgcccgccaccacacctggctaatttttgtatttgtagtagagacagcatttcaccatgttggccaggctggtcttgaactcctgacctcaggtgatccacctgccttggcctcccaaagtgctgggattacaggcatgagccaccgcacccaaccagaaccatagattttgaatggaatcagttaggagaaacagaattctatgcataaaagtttgtgacagttgatgtgagggctgcatccctgtagccccatgtactctctgaaataagccagaaaagtcaagataaagatcattctgtggacctgtcatcaaaagagcacagactggaaggtgattttccaacactagatggggtaagttgtgttgaaccatctgtgcttctccactgagtgtgtcttgtgacaaactgcagatatttgccaggtggaagatcaaggttaaagatttgatctgagcaaaactatttgatccatctggcccaaggcaacccctcaagtcttggccgcattaatgctgttctcacttgtcaaccagttcatgctctaatttgctcacttcctttttcttctaggtttcttaacacatgaaagaattttcaccccagttcttcctcactaaactccattgtgattctctttggaaaataatgactccccttcagcccttagctggagagactcagagattggaccaagtcacagagatcctttgggctcagcttgcaagactacttcacaggtcaagccaagttttgagggtgaatgaaaattagaacaacctgtgcagccaagtatgtgggggtgaggactttgggacacacgagagtcctcagagccatctgcctggactgcagaaggaaagcctgcagatggcagggccacttctcatgagcaggaatattgtttttgcacttttcactagtagcaaatgctgctagtagcctttcttgcctactttctcaggaatggcactctacttagctctttcgagttgggcatgtggcctgatgactatattgaccatcctttcttgcagcgactaagcactagccaatgaggtacaggaagctgtaggtgccatgctgggaacatcctcaaagggaagggagtgtgctcttatcctccctctttcctccttcctgctggctgcaatgcagacatgatggcctgaactagagtaacactttcattctatgaggacaagggtcttaccctaggtcttcagattttttgctcttaggacacacttgttatggtctgaatgtctgtatccccccagaattgctacgttgaagtcatgccccccaaagtgatagtatttgggaggtgatctggtcatgagggtggagtcctcatgaatgggatccagggtgcccttattaaaaagagcctagagggctagccccgcccttccctgtgaggacgcagtgaaaagtcaccatctgtcatagacagccagaatccagattcctcatgggagaaaagtaaatgaagcttctttgtagttgaagaggctgctatttggggccttttgtcctttgtggaaaaacataaacctaaatcatctgctctttgaggggagggttagtgggatatacacagtggccctatttctgtgatttttttgtctccccagaggctaaaaataacacatgcattcttacgcaatttgagcaaatttttaaaagacaaaaattttcaggaaggcattcctttttctcttttgtcagcttttaagataaaataccttcttacatgcatacatatgttcactgcagcactattcacaatagcaaagacatggaatcaacccaaatgcccatcaatgatagagtggataaagaaaatgggatacatatacaccatggaatactatgcatccataaaaaggaaaaaggtcacgtaattcgcagagacatagatggagctggaagccattatcctcagcaagctaacacaggaacagaaagccaaacaccaaatggcctcgcttatgagtgggagctgaacaataagaacacagagaggggaacaatacaaacaggggactctcagggagtgcgaggggagggagagcatcatgataaatagctaatgcatgcgaggcttagtacttaggtgatgggtggataggtacaccaaaccactatggcacacatttacctatgtaacaaacctgcacgtcctgcacatgtatcccagaacttaaaataataaataaataaataataataaaaatatcatgttcacttttcctacataatgaggggagctctacatggaaattctgagccatggggttcacttgatgtgcagttgcaccacattctaaacatcgttcctgaatttaaaagcacaacacagcacagagttaacattgatcttcccaacacccctgcgagatgagtgtggttatccccattctgcagatgaggaagccagaacatgaaggagcttggctattattataatatcatgcttaccattttcaaagcttccctgttcattaattagcacatcctctcaataagcctgtcaggtacataagtgtactttgtcctcacatccaagcactcctatatcctttatgaatccggaactcattagtaatcttccaacatcctctgaagcttgtggagtatctggaagaaagaggagtaggtatgtggaggaaggaagctgcaaccccccgggttaaaaaggaatgaatgaagtggtcgggtcatgcctgaagcaagatcacaagatggttaaatatcaacctgttgtccagatcattagaatgcccatctgggactctctctacttctactatgagctcctctctcagagtccgataccagttatattcagggtaggacctactacagctagctccccatgagtgtgtcttaaatacagatccatgaaacattgctgtgaggcccagcaagcctccagcttcacctgcattctactggaagcacccttattgaagaagtactaagaccattcagtggtccctcccaacttctctgaaggtatatttcagtgggtttaaaatagactagggaaaggaaaaaccatcaagctattgatactcctctaatggctataagtggttgagaaaatgactgccaaaaaatctggtagtggatcctgctgtaaaacatgacatggtacttacagcatgcaacatactgccataaattgtgcaagctccaatgccatagggcatgaaatttaattttttagtgagggaaggaagaaatggaaatagtgcagccttctgggggtgggcatggtattccccgaagcactttataagtctataaggaattaaatagtcaagttacagataacataattggtcatattacaagggaaaatgaataaaataggttaccataatttttcagaagaatgaactttaaaaaaatatgtgttgattttttccccatatctctactccacagataatttcagcaaggcaagaatgtattattgatgaatgagcaaagatgaatataatattatggcttaggataacacatagaatttactcattttctatgtgataatgcaaataatattattcttgctcatactttcttcatctctccttgccttcttccttgctaagaattttttcatgggaaaaataaaaaatacctatctctatcaaaatcacagctcttaagggccataataagtcacaactggcacaactctcaatgatacatcagtatttgtaattcatgactggcttggcactcttacagagctacattggaatccatcctaatccgttgattaacatagagaccaagaggataacctcttgcattccttcccattattacgatgtccatcaccaacagaattatgcatccattgtattatgagtaacaaagtaacctgcaacacttgaagtaaaaattggacctactgagaatgcctcctctaggccaaggcactcaaagcgtggtccacaaactgatgttggcccatgaactgatttgactttgccacaacatcttagatgatcccaaatgatcagtggacttgtctcattgaacagtgtatagatcatttctggagctgtctgactcccttggtgagtcattttggtgatgcctgacaccagtcttgtgcagtagaactgcatgttggtctgtaatttgctgaaaatgaatgcaaactaaaataaaataagtaaccacagtgaggttaagaagcaccattgtagcccattttagtcatggaaccaatattctctgcagaggtgagtgtcttgctgctggacagagttgaatatagagatttgaatttctttctttttgagacagagtcttggtttatcacccagactggagtgcagtgacgcgatcttggctcactgcaacttccgcctcccaggttcaagcaattctcatgcctcagcctcctgaagtagctgggattacaggggtgcaccatcacacccagctaatttttgtatttttagtaaggacagggtttcaccatgttggccaggctggtcttgaactccaagtgatccgcccgccttggcctcccaaagtgttgggattacagacatgaaccatggtgcccagctgagatctgaatttctaataagtaaacccctttgggtaaacatgtccctccaagctaagaagcgggcatttgggagagaatggaattgatttaaaggggaaggacataactctcttgttctggagattgccaggacagtaaatggaacatgaattgagtccattatgtggatcaaaccctaagcccaacaaatctaatttcccaggtacatccagatccccaaatttccacttactggaaattgtagtgcaaggctcaaaacctccccctttatacatctgtttacagacataatatttgatcagagagaagtttaagtcagttgttttgtgattgagtagctcaagaatataacaggtttgctcatcgaggacaggtatcagaggtgcttcatgacggtgtggtgatggcgagcacaagaacagttcttcctggtccccatcttcgtcaatgaatttccttgatcatttcctaggtttaaatttgtaaaggtgagtttgcaccaatatgttcactcaggggacatgcctcaaaagggtgtttagaaacttccagcagctggaggcatggtatccagtgtcattcttcttcacaccacctgccaatcccctttgtcatctccagatccccagatcttcttttttgttttttctttttttgagatgcagtcttgctctgttgcccaagctggagtgcagtggcacaatatcggctcactgcaacctctacctccccagttcaagtgattcttctgcctcagcctcctgagtagctaggactacaggtgcgcaccaccacactggctaatttttgtatttttagtagagatggggcttcactatgttggccaggctggttttgaactcctgacctcaggtcatctgcctgtctcgcctcccaaagcgctgggattacaggcatgagccaccgcgcccagcctactcccagatcttctaatagccaagttggaatcaaacacccaagagaaaaatattttaaactaccgtccaaaaacagtatgtctgtaattaagagaagattttaatctttaaacaggcaaaccaacacatgttaaatgcacagagaaccagaccaaaaaaaaaaaaaaaaaaaaaaaagctgaaaacttgaaacgtttcatttttttaaatatgcagatttctaagaaaatgttcctgctgagggcatcttaaattttggcttaatattaattgacagtcacatcagtgtgaaaacagtggtttgaagaaaatttcttcggccagagtgttacatactgctttgttctttcatacttttcagcaatcaggaaagaatggttaagtatctcttagtattgaatcacaacagaaagaactaaaattcaagaatgatcttaacaggaataagttggatacagttctgcctagaaatgggcatgacccagaaatgagagctcagcttccttccaagtttaaactcccaggataactaacttgaaactaaggataagtctattgattgattcagataagcttaattaaaaatgcttttcctaaatgtactttgaacttgagtttttacagagcccttctcttgaataccttatcaacaggcagccaacagaatcttccttcccttccttcttcctgccttccttcttttgtttctccttccctccctcctgtttcctttcttaccttttcttttccttttttcttccttctttttgtcctttcttcttttttcttttttcttctttccttcattcttaatccttctttctcttacttttacctttcttgcctttcttctcttcaccctttcctcttttcatcctttttttctgtctttcctgcctatttttttgtccttttctttaacccttccttccttccttcctgcctcccttcctccctctcttcatctgtctccctccctccttccctccctcccttccttccttcccttcttccttctttctttgcattattctttcttttttctgctttatttctctccttcgtgcttttccttttttatctttctttgtcagcttcctttattttctttctctttgctttcttctattacgtctttctctttattctttcctgcttttctttcatagccttttcctttctccttgcttaatttttttttaattctagatgtgtgggcaaaacactttctccaaattggttccatgcagtacttattcatcagctccaagctgcgaaaacaaaagcaaaaagcttacaatcacttcttatttccaagacaataaaatgttttgatattatagaacataacttactaaaattagtaaaaacattgccccctactaacactttcctttgaaaacttgctctgtgcaagtttctttaaaacctcagaagcattaaatcctcattaatataaacccagtgtatttacggtgtcaaaatatgttttagaaaagccaaaagcaaccgttacacaagttgcctcattatcaataatctagcattatgccttttatgtgtcatttctttacacaatatactatcattgacgacttttagcaaatacatcatggcaaaggattactctcatcagaggcagcctttgaaaaggatatgctaatttctagggagcaagaaaacatcaaaacagtgccagcaaatagccaagggacttttatgtcttaatatccctcagaagtgctttatctcctagtgcaacgtgtatcatagtataaacaggaaatgaaacagccacagcatcaaagaagcgccaggccatggctgtaatttcagatcaggtttaataaaggttatctatagtaggctaatcaaacaaaagggtgcatgttttaaagagccatttgataatttccatttaaggtgccctatcaaagagatcctaacaatgtcttaagactcccgctgagtcccagcacctcctttccaacacgactcccttgaatggttgcaagcctatctagatctcctaatttttagttgattctaattttgaggtgatcagcttaacagaatttgacttactttcttgcaggccttgatttaaaatatatatatatatatataattttttttctgtgtatgtatatatatattatatatatgaacaaaagaatcaaaactggaacagagtgtgagcaccaagagaagagtatctggaaaggcaccaagcaattatatccagatccacagccaagcaaaggcaagttatcaggcaagtttttccatagaaatacttggtgcctccaatacggcactgaatttaagtccagcacagcatcaactcatggctttcaccagagcctgaacttgagagcaaccacatgaaacagtccttcttctacttatcagttaggtagaggaagtgtcattaagtagttcagccttcaaggttctgatttaggtaccaaaaacgtgtcttggtatacccgtgtcagtgaatgaccaagaaaacgaatccaattttctctctgctccatactgaccataaacgccttgacaatcgtaaacctgagatctgcagacagagagcagaaggcagatgcttcaacatcgggctcagccctgagctgggagccatcccgtgtcttgggtgacacagcaccacaccttcgcccccatgcaaccactctgcagtccagccgggactcggccccgcttcctagctgggcagagaatacccctaacatttgcaaatcaaatgcctcattcagctcctcccagttgatgaccatggagatgctggaggacagatgggccacctgtcaaaaaatctcatcaggggagagacagtcaggagggaaaatgtcatctgcttagaggaggtcctggctcagctggggtccaagtaagtcagtctgctgagtcctcccctccaggcattcccaggaaaactgagtaggctatggccagtctctgggcttattctgttccatgggggatgtcgggggtagagtgggtaggggagtttctggctggggacatctacacttttgggtccccccacccccaccaatgtcccagctgtaagcctctccagaaaacaaggccttcctgcttttccctaggctgtgcctccgagcccctccacagaccccagggagggggagaagggggccctcaggcacatggcctgcagcccatccatctcagcccatcaggcaggcagggctgagctgcatctccccaccactcccaccccccagctgttgccatgacaggcctctgtgcagtggagatccaggcagcccagacactggtggccagggcacggagggtcaacgccgtggctggggcaatgccatatgccaaggcccgcggctccgggctctatccaccaacagtcgcccactgggacccctccagctcattgttgaagcagctggggggcgggacattttatgctttgttgagagatagtctgcctttttcatctcttccctagacctctggcccccaacagaggcctaactatgttcagcccaagcgcaccaattggctacgagccggggctacgtgagggcaatgttgatgcggccagggtcgcagagtggagtcaatggtccacaccccccactcccacccaggcccagaatctagcccccacgagcaaaactcaagtttgacaaattcccacagcacaagcgacccaacccatccgaattccaaacctgtactgtaatttctccacccttatattctgtgtgtaggaatctgataaaacaaaaactcaatcactcccacaaacaatgcctgctgccccatccattcagggtaacagatcaaaggcaccaaggacagacagagtcataaacatcaatctcaatcccccaagagctttatccctggatctccaccccacccattacaaacgtacaaatgtggtctggaggctctgggatgagtttcaggacaagtgtctttactttctgtgcaagctggccaggggaaaagttctagggaaaataagcttgtcaaagtcaatttttaaaggcttgcttgtaactggagtgaagcttttagttttttccttccttataacttaacttttagccaatagggaagttgcctggctaataggtaagtttgtgtcagttggggctacaggaaactacctattactatcatttttaattttattcactcattaagtatttctggaggggtttcttttttttttaagacaaggtctcactctgttccccaggatgaagtgcagtggcgcaatctcagctcactgcagcctaggcctcccgagctcaagccatcctcccgcctcagtcctccaagtagcggggactacaggcgtgagccaccatgtctggctaattttttaatattttgtagagatgtggtctcaccatgttggccagtctcaaactcctgagctcaaacaatcctcctgccttggcctccccaaagcactggtattacaggcatgagccactgagcccagccagggtttctttttacataagctcagaaggacacctactagagttcagaacccactctgttttatgtgaatataatattccactcctcagagggccgttacagcagtgggtcactctaattgctatactgccatgagagtttctttggggagtccaagcgacacatgagaactagaacttggatagacctggatttcaatccagcactgcaattcattatctgtgagagccttgatctcctcttctataaaccttataggactgttgtgaggatgaaattgtcaataattataatggcaaattcattgaattcttagtatggactaggcatggtgctaggcacataaacctttcttatttaatctcaactacactatgagataggtattaccattatttatatttcaaaaatgaaacaggaacagagaggtcaagcaaggtgcacaagatcacacagctacctaatggtgtagttgagatttgaacccagacaaacatgcatgaacataaaattacaatgtggagaacaagtgaaaaaaagatggacctgtgctatctgatacatgaagacagcacagacagaacatgtccaccatcacagaaggttctactgggggccaggcacagtggctcatgcctataatcccagcactttgggaggccaaggcaggcagatcacctgaggtcaggagttcaagagcagcctggccaacttggcgaaaccctgtctctactaaaaatacaaaaattagccgggtagggtggcaggcacctgtagtcccagtgattcaggaggctgatggaggagaatcgcttgaacctgggaggtggaggttgcagtgagccaagatagtgccactgcactccagcctaggtgacagagcaagactccatctcaaaaaaaaaaaaaaaaaaaaaaaaaaatatatatatatatatatatatattacatgaaacctcagtgtattccataaacaaaagtgccacatcaattagcatttattaattttctaaagtcaaattagaccaggcacagtgtttcacgcttgtaatcccaacactttgggaggcctaggcgggtggatcacttgaggccaggaattcgagaccatcctggccaacgtggtgaaaccccatctctactaaaaatacaaaatttatagctgggcatggtggcatgtgcctgtaagcccagctactcggttggctgaggcacgagaatcacttaaactcaggaagcagaggttgcagtgagccgagattgcgccactgcactccagtctccactgcacttcagccagagtaagactctgtctgaaaaaagtaataattttaaaaataaggtcaaattaataacatttactaattacaaagtcggtgataaacatgatttttatatatggtaatttatatactacttatttttaaacaatttttattgtgaaatattacatatgcatatgaaaatgcatagaaaataaatgtggagcttaacgaataattacaatgtcgatgcccaggtagccaccatccatgtgaagaaattgaacattgcctgtaattgagtctcaatttcctttccaccccgctccctgcccctttccaatcacatccccttccacccgccagagttttctgccatcatgaagctgtttcagttgatgaaaacaatgttaaatttagggttatagatgcaaaatcagcaaacagcttgtgagttaagaacgatttctagggctacagtggctcacacttgtaatcccagcactttgagaggctgaggtgggagggtcctttgagttcaggagttcgagaccagcctaggcaacatagtgaaaccccgtctctacaaaaaataacaaaattattcaggtatagtggaacacacctgcagtcccagctactcaggaggctaaagtgggaagattgcttgagtctgggaggtcaaggctgcagttagccctgatctcgccactgtactccagcctgggtgacagagcgagactctgtcccaaaagaaaaaaaaaaaaggctttaactttttacgtggttgcaaaaaaaaatcaaaagaacatttcatgacacatgaaaatatatgaaattcaaatttcaaggtccacaaacaatgctttattgaaacaaagccataatcattcttttacatattgtacgtagctgcttttctgctgccagggcagagttgagtaatcaggacataaactgcatgtcccacatgcaatttatcacctggctctttatagaaaaagttcgcctatccctcttctagatgataactcattcttaaaccagcctcaacatccaatgtataaattatttctacattttcattttggctatacagtaataaaaaacttttgattcacacagactagaggttgagaatggtttgtttgttacacacctcaccttgcaatcttaaaatactcttcaattttaagaggatctgaagactcaaaagagtagcctgaaactttatttccaagttgaaatacacacaatatcttaccttggcttacattctttatcggagatatagaagtgaaagaggaagcatctttaacctaggataagtgcagaaaacatctataataccatattatcaggacacatattatgtttactcattattgtgcaactgacaagacaatgccaagaacatgcactgagcagatgtgcctgagttctgtctgccagtgaatggagtcgagcccacgtcagctgtggcagtacaaaatttcatgtgagcaaacctgcaaagcctgaacttaggaaaaaagcaattcattctttctaatcaatgacacattgacaaggatttaaattgacctacagagacaataagttacgaaagacattggtggtttctgatgtgttaccatttggtagataacactcatgtgtagacctgttgtttttgataacagtttttgaaagtcttgattttttaaaatagaaattgaatgcagtggttggggaacccccagttactcacacatgttccactggaatgttcccaggatgagagaaaaagttgggatttgttgttgatgattctaaagtagtaattttcagagtccaaagatggagatgactctgcatatcagaattggggaaggagatgttatattcataacacagaccgcacagagtcaagtccaacaaagccttcttcttggggcctatgttgtaaaaagttaatgagctctgccctgggacagagctgagctgtcattagcatgctttgtgaagagaggaatcaattagcccacggcaatggctccatcaccttcccagcaccttctagaacggctcctaacactccttcactcagccaactatcttttcccagtctttttctcggttctgttctccagccccacaactccactgtcctatggaccacaactttcctgacctcctgctgctctttcctctctcagtgccaggcccagctgcaccatgtcatctgcagactgattccagaggcccctatcctgtaccaggtgatgcctaacaactgaaactggcccaagaccatcagttcttgctctgtcccactccaaaactacatttccatggactgattcagtatgcatccttgtgctagcttcataccttctgccgtatataagactcatgaatggtactcaaagattctcattatatttttaatgattaaaatactattaattgacatatttattttaaaatattatttaaattttaaaatcagttcaatattattaaaatacttattttaaaaggaaatgttatattcatccctttgatggaaaagaagcaggactgccgtgcataaaagatacctcataaaaatcaatgcagtgggaacaaagcaacattaaattagattctacatgggtcctacttcagctgagggttctaagcctggatcttgttctctgccgtttaaaggtgggggagattaacaggttagaggggtgttaaagccactctcatcccaggctgagcctttcttcttgcctgagatcaagaggatttaaagaaagttgcaaggaggggtaactgtcttgctctgtgattcgacactatttaggctgtattcctttacagtctaaaatcatctctccttcctaggagtcacacacatcccatagattgggaagcaacacacaggcatacctcggatattgcaggttcagttcagaccacagcaataaagtgagccacataaatttttctgttttctcagtgcctataaaagttatgtttacaccatactgtggcctattaagggtgcaatatcatcacttctgggggaaaaaaaggccataattaaaaaacactttattgcctaaaaatgctaacaattatctgagccttcagcccgccatcatctttttgcctcgatgttgatggctactgactcatcaggtggtggttgctgaaggctggagtggttgtgacaatttcttataataagacaacaatgaagtttgtcacatcaattgattctttcacaaaagatttctctgcagcataagatgctgtctgagagcattttactcactgtagaacttctttcaagattggagtcaatcctctcaaaccctgttgctgctttatcaattaagtttatgtaatctttcaaatcctttgttgtcttgtcaacaatgttcacaatatctacaccaggagtaggttccatctcaaaaaaccactgttctgtcaatggagcagaatagagaacccagaaataaatccacatatttgcagcccactgattttgacagaaatatcaagaacacactttggggaaaggacaacctcttcaaaaaatggtgctgggaaaactggatgaccatacacaaaaggggggaagtagacccccatctcacaccatacacaaaaatcaactcaaaatggattaaagacataaatgtaagacctgaaactatgaaactgctagaagaaaacataaaggaaatgcttcaggacatcttctaggcaaagattttatgagtaagactaaaggcacaggcaacaaaaccaaaaataaacaaatgggactacatcaactaaaagccttctgcatagcaaaggaaacaatcagcagagggaagagacaacacacgaaatgggagaaaacatttgcaaactattcatctgacaagagactaattatctagaatttacaaagaacagcataaaggtaaataattcaattttaaaatgggcaaaagatctgaatagacacctctcaaaagacatacaaatggccaacaggtatataaaaatgctcaatactactaatcatcagggacatgcatatcaaaaccataatgagatatcatcttaccccagttagaatggctattataaaaaaagacaaaaaataataaatgctggtgaggattcagagaaagggaaacactcgtgcattgttggtggaaatgtgaattggtgtagtcattatggaaaacagtatggaggttcctcaaaaaacgaaagagagaactaccataagatccagcaatcccactactgggtatttatccaaaggaaaaaaaaatcagaataccaaagagttacctgcatcctcatgtttatcgtgcactattcacaagagagaagatgtggaatcaacctaattgtccatcagcagattaatggatacagaaaatgtggtatgtatacacaatggaatactatgcaaccataaaaaaacatgaaatcctgtcatccacagcaacatgggtgagcctggaggacatgaggttaagtgaaatatgccaggcacagaaagataaatatctcttgttctctctcacatgtgggagctaaaaaaaaaacttgagcttacaggagtagagtagaatactagttattagaggctgggaagggtgggtgaggggaggataaggagaggctggttaatggatgcaaaattatagctagataagaagaataagttctagtcttctaacacagcagtcaccaacctttatggcaccagggaccagttttacagaagacaattttcccactgaccagatttggggtgggatggtttcaggatgaaactgttccatttcagatcatcaggcatcagttagattctcttaagcagtgtacaccctagatccctcaaatgtgcagttcacaatagggttcatgcttctataagagtctaatgctatcactgatctgaaaggaggtagagctcagacggtaatgcttgctggcctgctgctcacctcctgctgtgtggccctgttcctaacaggctggaccgctatcaatccactgcccagaggttggggacccctgttgtatagcactatagggtatacatggttaacaatcatttattgtatattttcaaaatgatagaatttttttatttttttatttttttattttttttgagacaaagccttgctctgtcgcccaggctagagtgcagtggttgcgatattggctcactgcaagctccgcctcccaggttaaagtaattcttgtgcctctgcctcctgagtagctgggaccacaggcacccaccaccataccaggctaatttttgtatttttagtagagacggggttttgccatgttggccaggctggtcttgaactcccgacctcaggtaatccacctgactcagtttcccagggtgctgggattacagccgtgagccactgcacccggctcagaagagagatttttaaatgttcacaatacaaaaaatgataaatgtttgaggtgatggatatactaattaccctgattttatttttacatattgtatacatgtatcaaaatatcactctgtatcccataaatatgtacaattattccatatcaactaaaaggaaaagaagttttatcatgagattgcagcaattcagtcacatctccaggctccgcttctaattctcttgctatttttcctacctctgctgtaactttctccactgacatcctgaatctctcaaagtcatccatgggggttggaatcaacttcttccaaacttctgttcatgctgatgttttgacctcctctcatgaatcatgaatgttcctaatgacatctacaatggtgaagcctttccaatttactttgcccaaatccatcagaggaatcactatctatggcagctacagccttatgaaatgtatttcttaaattataagacttgaaagtcagaatgactccttgatccatgggctgcagaatggatgttgtgttagcagacatgaaaacattaatacctttacatatgtccatcagagcacttgggtgaccaggtgcattgtcaatgagcagtaatattttgaaaggaatctttttttttttttcctgaggagtaggtctcaataatgggcttgaaatattcaatgacccatgctgtaaagagatgtgctgttatccaggctttgttgttccatttatagagcacaggcagagtcgattcagcatcattcttatagggtccagggtgttcagaacggtaaactaacgttggcttgaacttaaactcaccagctgctttagcccctaacaggagagtcagcctgttcctagcagttttgaagccaggcattgacttctctctagctacgaaagtcctagatggcatcttcttccaataaaaggctatttcatctacattgaaaatctatttgtttggtgtagccaagtacatcaatgatctgagctagagcttctggatagcttgctgcagtgtctccacagcacttgctgcttcgccttatatttttatgttaaagagatggcatctttctttaaaccttatgaaccaacctctcctaggttccaactttccttctgtagcttcctcccctctctcagccttcatagaattgaagagagttagggccttcctctggattaggcttcagctgaagagaattttgtggctggtttgatcttttatccagaccacttaaactttctctatatcagcaataaggctgtctcactttcttgtcatttgtgtgttcactggagtagcacttttagtttccctcaagaacttttcatttgcattcgcaacttggctaactggttggcacaacaggcctagctttcaacctatgtcagctttcaacatgtcttcttcattaagtttaattatttctagcttttgatttaaagtaagagatgtgtgactattcctttcatatggacacttaggggtcattgtagggttattaactggcctaatttcattatagctgtttctcagggaacagggaggtccaaggagagggagagaggtggaagaacagctggtcagtggaggtcagaacacacacatttattaagtttgccgtcttatatgggtccagttcatggcaccccaaaacaattacgatagaaacatcaaagattaccaatcactgattacagatcataacagataaataatgaaaaagtttaaaaattgcaagaattagcaaaatgtgacacagggacatgaagtgagcatatgctgttagaaaagtggtgctggctgggcgtggtggctcacacctgtaatcccagcactttgggaggccaaggcgggcagatcacctgaggtcaggagttcaagaccagcctggccaacatggcgaaaccctgtgtctactaaaaatacaaaaaattatccaggcatggtcatgcacacctgtagtcccagctacttgggaggctgagggaggagaatcacttgaaccccagaggcagaggttgcagtgagctgagatagtgccactgcactccagcctggatgacagagcaagactccatcaaaaaaagaaaaagaaagaaagagagagagagagaaagaaagaagagagaaagaaagaagaaagaaagaaagacaaagacagagaaagaaagaagaaaaaagaaaagaaaagtggtgctgatatattttgctctacacagggttgccacaaaccttcaatttgtaaataacactttattgcaaaatgcaataaagtgaggtgtgcctgtagttgcgagcacagagggcaaggctccaggactgctgctgccactcctgagctctgtgtccctgacaagttcttacagttactgtgccttcctggtcccttctggacaaggacaataacagcctctacttcagagcgacagtgccagcattgaagtttttaaacacagctcccatcacatagtatgtgtgcaacaaatgcattcatttattcaacaaatattttgtggctacctgaaatgtgctgagcacagctctgggcattggggattgtggctcatgcctgtaatcccagcactttgggaggccgaggcgggcggatcaccaggtcaagagatcgagaccatcctggctaacacagtgaaaccccatctctactaaaaatacaaaaaattagccgggtgtggcggcgggcacctgtagcccagctagaggcaggagaatggcgtgaacccaggaggtggagcttgcagtgagccgagatcgcgccactgcactccagcctgggcgacagagcgagactcggtctcacaaaaaaaaaaaaaaaaaaaaaagcctgaggaaactccctgtcctcgcggagtcacatgctgttatttagctatgacagccacagacgatctgatgaaaagcacttagattactgctggtcttcagagtgacatcattttagtctgtaacttgaggcaggcttaggatctgatgacagtctagtgttctgtgcagttgtccctgcatcatcctctccccctaatgctcttgtcactgagcttacaggggcatcctttgtgcatcaactgaaagcttcatggtaaagatgcctgctctcaaaaatgagatcaaagactccaggtaaccaaggcaacctgtgagagagactccaggatgccggcctcccattctgaatcatctctggctgcagctgagctgtgtggcaaatgttttcctagtggggctggcatgcttgaaagaacaaggtctgtggaacacacagaaccttccccttttcctcttgtgaggagggagggccttaccaatactgatgatgtctaagtttcaggacccctcactcacatgggcccctctgagtgctggcaggtgctaggagttctagaatgttctagtggggaggagaagccaggtggcgatgaagacacacttctctgtaagcatttctgatacttcagtaaaaatttgtgttctttctttttatttttttattttattattattatactttaagttttagggtacatgtgcacaatgtgcaggtttgttacatatgtatacatgtgccatgttggtgtgaaaaatttgtattctttcccttaaagagagaccccaaaacccttacagaagagagggtctgtaagctacagaccctagaaaatctgagtttggccctaactgggggttcctagacatgctctctggaggatgccagtccagggaagagcaaaccatgaggcaccacagacaagctgggtgagcatgggcaagcccctctctggacaatcaccgggtaaaggggacaggaaggctggcttctctgagccttcttgctctgtttgttgagtcactcttctctgccctggcaggccctggagccaggggagccacaggcagagcgatcaccaagagcgtggcttccacaccactatgaactggaggaaggtgggggcttctcccatcccaaccccactatatggaccacacccaccctaggcattactatggggtttctgtgcaagcattttccacagcactgtctccaaactggcaaataacaatctagatattaataaccactttatattttattcatcagagtatgaattgaggtgggcatctttattttttattttattttattttatttatttatttttttgagacagagtcttgctctgtcgcccaggctggagcgcagtggtgtgatctcggctcactgcaagctccacctcccgggttcacgccattctcctgcctcagcctctggagtagctgggactacaggcgcccgccaccacgcccggcttattttttgtatttttagtagagacggggtttcaccatgttagccaggatggtctcaatctcctgacctcgtgatccgcccgcctcagcctcccaaagtgctgggattacaggtgtgagccactgcacccggccgagatgggcatctttataacgagtatgagttgaaatgtgcatctttataacaggcagtatacgattaaaggttgctgatacacacaagcatgctcctgtgtgtggaacttttctttctttttttctttttcttttctttctttcttttcttttttctttttctttttttttttttttttagatgaagtctcgctttgtcgcccaggctggaattcaatggtgcgatcttggctcactgtaacctctgcctcctgggttcaaacaattctcctgtctcagcctcccaggacacagggattataggcaggcaccaccacgcccagctaattgtttatattattagtagagatggggtttcaccatgttgtccaggctagtctcaaacttccgacctcaagtgatccacccaccttggcctcccaaagtgctggaattataggtgtgagccaccacacccagcctgtgtgtggaactttcatgacacgtgacatctcagctgaaccagcccaaggtcattttggttaagcaactcaaggaaattccatataaagaaggtgttgccggtcctgaagcttgcatgcatgacttcattcattagtctggtatttaatacaaaaaatgttatttatctaaataaatggatagataaatccccgtgtagcagtgaggatgtttttggctacaaacaacagaaaactcatatcgagctagcctaaatacaaagggaatttgttggttcttataatgaaaagcacaaaggttgtgtgagcttcaggagtggtttgatccagacattcaaactatcataaggactcgactgatttttttcacgaatgtattttctctgccctttataatatgtcactatctttggttgggtgcctagagaggtagagtctgacagcaggattctcagaggcaagtggtttatttgggattcccataaaactccagtaggaagtggggagatgagacaggaacaaggaagatggtgaaaacaggtgtgttgtcaagcaagtgaccactaacggcaacaggagcataacccatggagcaacgcaaggagacagtgtagagcgtgcatcttcaaattaccctgcccaaagagcaagggagcagggcatttatctgcccatcccagtcagtagttattggtttagggtagagttcccttatagtaacagcgattccaaagcagtcaaaggcctcactcctcaccccccgcagaaggagagtacagctctctcccagctttccacaccaagactgagagccactctgacgcattgatgaattgtacacccaatcaatgctgaactaactgtatggcaagggaggggacaggatgtgctgattggcttagtgcatagtagtgctgtctttccccaaccactacatggctttccagcacggactgaggactttagaaaaggggaagggaaaagaggatacaggcatctactacacaataattaagtaatggtctggactacttaacaaacactagattattaaactcaaaggcaccagaggtctcctgtgtggtcatagaccaaaatgctccagtgtcaggcaataatgcaaatggtcaaagtgggccagcaggaggctgctgtgttctgtaggtgctcacacccaggcagaataactagaccctgcacttagccctggccaatggctgccacgtgagaatgtgggcccaggggtgccagattctctgatatttcaagagtagccagaaatctggattttttaaatgaaatctccccatctgaaatgttggaaatgaattcaaaatgttttggatacttcatgggccaaatgacacacatctgtgagccagacgcaatcttggattgccagtttgcagcctctgatgcagatccaccccttaattttacagaagggaaaacggaacggttccagagacactcagtgacttacccaaagtcacgcagctggtcagtggcagagctgggactagaaccgttgtctcgccattgtggtttgttataattgctgatcaactgtgcttaggaaagatccactcagtgcccaaactaaggatggcaaactagaacccctggggccaattctggctggcagtctgtttttgtaaataaagttttattggaacactgccacacacatttgtttacatattatccatggctgttttcccaatacaacagtgggattgagtcactggaacagagatcacatggcccacaaatcttgaaaatacttactgtcagaccctgaacagaaaaagcttgccaatccttgttctagattcttgatatttttagatgtcgtaatttttgtttcagctactcatgagatgtctcaatggtctgaggatattatttaataacccaactgaatgctacttgcaatgtggcaggtctgggttgcaggtcccaggaaggaacagtgattgagccaggcagctgaagcttatcctatgcaagttattcccatgagatgatgaaaagaaaaccactgctatcaccaccaccatcaacgatggcaacaacagaaaaacttctctcaataaccctgaaagaaaaaaagaattaagaggctggagtgcaacggtgtgggacctcggctcaccgcaacctccgcctcccaggttcaagtgattctcctgtctcagcctcccatataaagtctcttataagtaaatagaaattttagataaatagtagaatttggtcatggcagtgaacagcaaagacacgcgtacgcacacccctctggaaacaagaaaatgtgatttgtgaagcaatttcagagactgctccaagctgcataaaaattatgtgcagccaatgaacgagacagcattgatgtggatgaaaaagttgctaaaccaagtgagactcagccaggactcccacctcttgcaggaaacatgatctcaggaagggcttctgtcaggggcacttcatccccctggcttcaggcttccaccagggtggtgtccaagcctttctccccacccacctctgccctgctcctgggagcagggcttgctggtctgattggtgaggttggcaggagaaaccgggcatactcagctcagtccctcctgggctcacgttggccacagagtggcagtgcattctcaatgcttctctgacacatggaaggctctcgccctggcagagggggcctttgcctctgccagggtctgggtgggtaggaacatctagctcagggatgaaatattagaaagcccattggggccatatgcctaagccatgcctccaatccagcttcaatcactatctccagccatctgactcctgtcttgatttggaacttggaaaaaaggaaagaggtgttatttattagacacgactgtttataaggtagcagtgttactatttcacagtgcattttgtaggggaattatcttctacggctgaagtcacagacttggagatttttatgctccccactcaaatgccaagggccctattgctgatctagaagctatcaatgcaggataagaagcccagcccacaagatgtttatcatctatccaatagttagtagatggtcaataagttagttgatgatcagttagtagataatcaataagtgttgtttaatatattaaataaagtattgaataaaatatcagaaaataatttggaacatcatagagtacaggtttatatatatacatataatctcaaatcaaatagatatttatcaggcattttctgtctgtgatttaaaccctgatatagctactgatacacgctttctttcatcaaataagtatgtaaataaaagttctttgggaggaaaggaacagcttctcgggtctcatcaaccaagaagtaaaatcacgttgcttcaaaggacaggcatgtagataaacaactagaaaataaaaaatactttaaaaaatctatatgctcctggccaggcacagtggctcacgcctgtaatcccagcactttgggaggctgaggcgagtggatcacaaggtcaggagttcgagaccagcctggccaatacggtgaaaccctgtccctactaaaaatacaaaaatttgccaggcgtggtggcgggcacctgtagtcccagctactctggaggctgaggcaggagaatcgcttgaacccgggaagcagagtttgcggtgagacaagatcatgccactgcactccagcctgggcaacagagcgagactccatctcaaaaaaaaaattttttttcaaaaaatctacatgctcctttgacatcatgctctcccctgtaaccaaagggtcattcttcacttggagtcaattcattaaagctctcagaatccaccagaatgcatgggaactgaagtgaacattgttcaaagagctattccttctggtctttcattctaagactcactagaaccaaacagagttagaaggctaatttggaagcatgtgtgtatgtgtgggtatttatttcatcaacattatctatataatacacacacacacatatacacataaatagcattttcattctaacttttctgagcacaaatcaactgacggccagtgaccgggacctttctgggtggcctaatagaagtgagatgtgttatgaagatacgtaaatgagcagctaattgcaggtatatgagctactttatctggagaacaaattagcaatttggatcaagtgctctcaaattcaaagacttggatgctgtagtaggaacctagggctctatgctacaggaagaatcaggatgcagaaaaagatgtacttttttaaaaaaaatcagaaaaagatacaagactgttggttgctgctttatttataatagagaaaaaaggtattgatctgaatgtccaacaaggagacaacaagtaattgcaggttttgccactgaaagtaatggcaaaaaccgcaattacttttgcaccaacctaatagccaatcaattgcaatttgtttgcatggggagagggaggggcaggtgtcatgatgcctgaccagaaggacagtgtggcagagtggttgagcatgtgacctcttaatcagattgctggtgacccctcatgatgttaacctaaggaagttagctttttgtgtttggttttcctcatctgcaaattggggataatgttggtaactaacctcataaggtttggtgaggattaattcacttagtaccagcagtccttagaacagtccctggcatgtgataagtgatcagccatcattggccattttatgaaaaatgggacattttgtagtcactggacagcatgttttagaaaaatctctagtaatacagggaatctctgtaagagcattcataaacattgaggtctaacataagtacataaatcttaagcttacagtcactgagtctggacacataggtagtcctatgtaatctccactgcacacccacccaagagctaaccactattctgactttatcatcatacatttattttgcatattcttgaatatcatgtaaatggactcaaactgtctggagacttgtgtttggcttcttctgctcaacttcatatctgtgagattcatgcatgttgttatgtgtagcggaagttgattttttagtgctgtatagtatttcattgtatgaatgtatcacgtttttaaatcttttctactgctgctgggcattgggttacttctgatttttggttattatgaataaagctgctatgaacatttttgtacattctttggtgaacataagcacttgggtattactagggaataagttgtgccccctcattcatatgttgaagtctttttttttttttttttgagacagagtctcgctctgttgcccagcctggagtgtagtggtgggatctcagctcaccacaacctccacctcatgggttcaagcgattctcatgcctcagcctcctgagtagctgggattacaggcgcacaccaccgtgcctggctaatttttgtatttttagtagacttggccaggctggtctcaaactccatacctcagagatcagcccacctcagcctcccaaagtgctgggattacaggcaggaaccactgcgcctggccccatatgttgaagtcttaacccctagtacctcagaatgtgaccatatttgaagacagagactttacagaagtaattaagttaaaaatgaggtgattggggtcagccctaatccaatatgactgatatcttaataagaagaggtaatttgaatacacacacgtatagaaagaagtccatgcaaacatacaggtagaggcggccatccacaaaccaaggagagaggcgaggaagagatccttccctcacatccctcaggaggaaccagccctgacaccttaattttggacttctagtccagaaccatacagaagtaagcttctgttgttttaagttacccagtctgggctgggtgtggtggctcatgcctgtaatcccagcactttgggaggcagaggagggtggatcacgaggtcaggagtttgagaacagcctgaccaacatggtaaaaccccgtttctaccaaaaatacaaaaattagctgggtgtggtggtgcgtgcctgtaatcccagctacttgggaggctgaggcaggagaatcgcttgaacccaggaggcagaggttgcagtgagccaagatcacaccattgcactccagcctggggaacagagcaagactccgtctcaaaaaaaaaaaaaaaaagttaccctgtctgtagtactttgttacggcagtcctagcaaacaaatataggcatacacctaagaatagagttgctgagtcatagagtatttatatcaatcatataatcataagctctgatagataccactgaacagcacacaagttaaatttaaaaatcaggggaaattatacatgctttatgtttccaattgtatgtgtgtacatagatataaatatagacacatatatatccagatagaaatatagacaaatagatataagatagaaggaaatttatctgaaagttaactatagactttttttgtctttttaaaaataactaacatggctcacttatgtcatatagaaatgtaatagttactacaattttaatagtggtcattctgggcgatgtgattatcagtgttttgtagttagtattacaccagtttctgtattttcagatttttctacaggggacataagttccttttataaccagaggagggaactgttcctaataaagaaaagagaaaaggctgaaagaaaatatagtaatgtgttactggcattgacctctgggttgtgaaacttgggattattgttgcctgtccttcattttaattatctgcattttccatgtactataatgaccatatgttactgttatcatgggggtggagagaagaaacgttcttctagaaaatcagcaggaaaaaaactacaaatctacaataaactacaaatagaaatcgtggtaatatatttcaacaattgttgacatacgacaacaattgtatgatgcactattatattatttactagtaagaagaaaaacacttttaattgaactataacccttcatcagttataagatgcatactgatttcagagatgttcaattgtagggaaaaaatgcatctcaccactgaaaacattcagtgagtagcatcacacacactatataagaagcaacgtgatttcagagtcccggagcctaagcagtcctcaccatacctagaagcagaaaagatggagggctgggagggtcaaaacagagcccagcggaagattgcagctggaggagctggaatcctggctctgaccaccactccctggtggccaagaggggaaggagtcacccacttgctgcgtggttccctccctggaggacacccactgactgggcagggaactgtgacgtttaattggctaatgtctggagaacactttgaagatgaaaagtaccaggtgggtatcatcaccatacacttcttaagatgatgcatgagaataatcataaagttctccccaactgggcctttcatccacggatttcaaagcatttagcaaaccttaattaactctcacagcacctctatgaagtaagcattaatagcctcttacattagagggacagaaagaggaggtgagtgacttggccaggccctcagagagttagagaccaggtggacaatacgcgttcatcaggcaggcatgcattcagtgtctcctctgtggcaggtctcatgccaagctctggggaaaccccagggggtgccagagctggtcagtgccagctcgcaatctccagctgtcaaattttcaagaattttgcaaaccagttatgaaacaaagccattcttcaaagttaaattacataaatgtataattaaataaattgtattggaaacacaggtaatgaaagctcaaaatgtatcactccaaattattttacaactttctactgttatctgcacacttggggttattcacctgtggaatatctgcggggtggaaatagtgcagaaagctgtgctgctgtgcactccttcccagatccctgttcagtgacgtcccagtggtcccttgaaattgaccacggtgagagtgtttacaccatggaaattggcagatgctacagaccagggcttgacttactgtcctctggacttccagactttaaaaagtgatggagaaaatgttaaaaatgcaggttaatattaaaagcatgtcatttctatagccattacattgtgaatggcacacacaaaagattgaggaaagacttccatgcttcaaaagccattatccaattcagcaaagaaatcactcacaacgtcctagacaaatgagtgacgttcctacatacatcctcgttgtttcacttccatcttactccagagcaaggaagatatcccaccagtctccatcaagagagccaaaagccaagcatggtccctcacccagcagagaggcccaagatctgggacctggacagtagatgtgtctgcccagtccagtttcccatcctgccaccccctagcccccaccaccgtgtgactatcatagaaacaaccattttatataacaaaaccctgctgccttcctggccacatttgattggtcaaaggcaggctcctggtctcttcctgagaaatgtgggactggcactgagaaagacagccaggccttctggtagctgaagctgtaaaatatcaatctacgaagctgcagtagccaggtcacatggaatccaccttaccgataaagccaatcaggggagagcagaaagaaggcagccacagcagaaagattcaggggagagacacgatacagtttggctgtgtccctactcaaatctcaccttgaattgtaataatccccatgtgccaagggcagggccaggtagagataattgaaccatggtgtgtgtgtgttgtggggggttttcccccatactgttctcgtgggagtgaataaggctcacaggatctgatggttttataaatgggggttcccctgcacaagctctgttgcctgctgccatgtaagacgtgactttgcccctcatttgcgttctgccatgattgtgaggcctccccagccatgtgtaactgtaagtctattaaacctctttccttaataaattactcagtctcaggtatgtctttattagcagcaagaaaatgaactaatataagatatcttggcaatgtgttggtccctagattccaggtggccctgaactcagtgctttcctgaccttcttgctacttggagttcaactcttctttggattctacattatgccccagtgatatggtttggctgtgttctcacccaaattgtatcttgaactgtatctcccataatacccacatgttgtgagagggacctggtgaaagataattcaatcatggcggcggtttcccccatactattctcatggtagtgaataaatctcacgagatctaatggttttataaggggaaacccctttcacttggttcctatcctctcttgcctgccaccatgtaagacgtgcctttcatcttttgtcatgattgtgaggcctcctcagccccgtggaattgtgagtccattgaacccctttttctttataaattacccagtcttacatatgtctttatcagcagtgtgaaaacggactaatacacccagtatttttccagcaagttcccctcttttgctaagctagctgggtttcagaaacttcaattagaattgtcctaactattataactaccaaggatgctaagttgattctttcaaaaatcttcactgggcttctctccaagttcttggtgtggtataaagaaatggtgggcatccaatccctgaacactgaagttgaccacctagatatacagcagggggatatacgcatcccaaagacagacaattggataaaacccaagtacaaacaaaaaacaataaaggtaatttcacacaacatgagaattagaagtgaactttaaggccaccaaatccagcgtctatctgacatatgaaatggctctaaatttcgacttcctgaaggatttcaatctattttcagtgcgttctcatgacaaaaatattcgtctaggttgaaccaaaatctgcttccctgtaactttgaaccactggtcttaattatatgccctggagctatacaaaatagatcaaagatttccttcacgtgatagccctttaaatatttaaagtcaaaatactattattactattcccatttattgagtaattactacatgccagcacatggttatcacgtttaatcttcatcacatgctgagaggtagatggcatctggagccttattttacaaatgaggatactgagacagagctgggggtgggaagggaagggactaagatctgatcattatcatatgtcaccaccttccagcgaggcattctgaagagttcaagaattggaccttccaggttgttctgaacttacatatgtcacaatgggaggatggaacatatttaatagtttgtgggcttgatttgttcctttcaattgtttagctatgtggtgcattggcctctatttgtactcccatcctgagccccataaatgttaggggtgagcctggtgggacatcttcagaggggctatctcttggtgaacaacagctacacattcctctccatctcagcctcctactgcttactctttagagttctagtctcctatttcccacaaagggggttttgcctcttattcacatttccatttaactgtcaccaccttctgccccttcactcttgggtgctgaaggccagctgggttgaattcattcccaggtcaacatgtgggtagcacctcagttttctattgctgcaaaacaaactatcccaaaacagactggcataaggcagccattctatcatcctgatgttatatgagcagcagtgtgaacatggcagtgtgaagcaggctggtctctgttccacaatgtctgatgcttcaggtgggaagacttgatgactagaggtgactggaatcatctaaagatatcactattcacacatctgatagttgatatcagttcagttgagacctcagggtggttgttggcctacactggcctctctatgtggtctttccatatgggctagtttgtcttccttacagcatggtggctggatttcaagagcctaaagagtgagcattcctagagggcaaggtggaagtatgtggtatttctctgctctaaccctagaagtcacacagcatcacttcagtcatactctactggcagaggaagtgaacaaaggttttcccaggtttaagggaggggatgtgggcccccactcaatgggagaattgtcacagtgtaagaagagcatggcatgggagatcctgttgtggtcattttgggaaaatattattttacacagggaagaaaagaaaggatggaaatggtgcttgagactgtattcgattctctgtactaacaactccattgaccatgccatgtgggggtccttattctgaatttgcaggtgaggaaacgaaggctcagaatagttcaggttcttcactcctacactgctggtgggaatgtcaactagtacaaccactatggaaaacagtgtggagattccttaaagaattaaaagtagaactaccatttgattcagcaatcccactactgggtatctacccagaggaaaagaagtcattatacagaaaagatacttgctcacacatgtttatagcagcacaattcgcaactgaaaaaatgtggaaccaacccatatgtccatcaatcaatgagtggataaagaaactgtggtgtgtgtgtgtgcacatgtgtgtgtgtgtgtgtgtgtgtgtatgcatatatatggtctctgttccacaatgtctgatgcatatatatatgcatacacacacacacacacacacatatatacaccctttatataccattaattcattccttttcatggctgagtagtattccaacatatatatttattttatatatatactgagtagtattccatcatatatatacacacacacacgtatgtacatatatatgatgtgtgtgtgtgtgtgtgtgtgtgtgtgtgtgtgtatatatatatatgtatatatatgatggaatactactcagccataaaaaggaatgaattaatggcattcgcagcaacctggttgggattggggactattattctaagtgaaataattcaggaatggaaaaccaacattgtatgttctcactcataagtgggagctaagctacgaggatgcaaaagcataagaatgacacaatggactttggggactcggggaaaggttgggaaaggggtgagggataaaagactacaaattgggtttagtgtacactgctcaggtgatgggtgcaccaaaatctcacaaatcaccactgaagaacttactcatgtaaccaaacaccacctgttcccccaaaaacctatagaaataaaaaatatttaaaaataaataaaaaaaagagaagttcgggttcttgcccaagatcacacagaaagtgacagcatacaccagtggtactcaaactttactgagtagcagaatcatctgaggggcttattcagacacagattgtgggataccacccccagggatttagattcaatcagtctagagtgggcctcaagaatctgcatctccaacaagttctcgcgtgatgctgatgatgccggcccagtgaccacagctggagaactgctggtatacagtttttgaagccatacctgggtgaacttctgcctcattatgcttgtataggagagcactggtattcctcacccaggaccagagaaacagaagaatgactcacggccatcatgtctttaattttttttttttttttttttttttttttgttgagatggagtctcgctctgtcacccaggctggagtgcagtggtgcaatctcggctcactgcaagctccgcctccccatttcacgccattctcctccggagtagctgggactacaggcacccaccaccacgcccggctaattttttgtatttttagtagagacggggtttcaccgagttagccaggatggtctcgatctcctgacctcgtgatctgcccgcctcggcctcccaaggtgctggaattacaggcgtgagccactgtgcctggccatcatgtctttaattctaagagaaaacatatgtagcaagataagattttcattattccttagccacttctctctctccctcttccactcacccttggagttcttcagtaaaacagcataaaagaacacagactttatcagcatggtaacctaccaaaggtattctctgagaggccatcaataatagcaaaagcaaggaggatctcatttagggcttcactctgaaaaaccaaagatgtcctcttacgctaatgcttaagattgagataagatgtaatgtgactattagcattcttcacggaatgggactccatgaagagaaaggagaggggcaaaaaagaagagagaatcttgaagaggaagggatattaagtaattgtacgtgcttaacatccattgtttccagatcttgtataggtaagatcgcatgtcctggcccacttcctgttgggtgggatcaggtggctagttcatgccaactaagccaagaagaagtgatgggcattgcttccatgctggggtaattgattgccagtgagagacccttcagagctctctttttctgttagcatggtagctggtgatgttcatgactatggcagctagatcagcctggggcagaacacctgccaacccacgatgcacacatgaagtgagtgagaaactaacatttgcatattttaaactcctaggtttgagggagtatttgttatggcagcatagctagcctattctaactgatacaggagaagagagagaaggaacatccaggtgtctctccaaggagcattatgaagacaccaaagtaagactgattaggaaaagcaaataaatcctttgtatcatgccctggcctctgtgagattgatgaccttcttacagtaagactcgtacgtctcttccagattttacaagggcatctaaggacatttggacctgcacttcctgtcattctccactgcatcacttagctttaaccatgttaaacgaaagctaaaccttcagaagacagatgccctctgaagtgtaacttcaataagacatcctgtagccagattcaaggctgagatcctgtgactcccgcccctcactgaaccccagttctgggtcctaacagagcttgctcagcaacatactctgtcttctgcaggttggtgaaggtgccaaggctttgtcgatgctgttcctgcaatatttctcccgccacctacttactgagcatcctttggaagatgcccagggctgcagcagccggcattcatggcattcctgaaagtatgtcctgccaggcaggaaaaaggggcagctttgtgctgctgggttctcagctcccagcactgcaccagcgaccaaggggcctggttcagaccattgtcttacttgatggacatagagggcccgagttccagcagaagcagctgggatccaagcctggatggcagagggtgggctggagctaccctaacccccccacctcaccatctgcctctctgggtttctattgctgtctgatttttaaaaataagttcaaatggaaaacaaagcaaacttgtgaaaaacaatgtgaagtgttgaaataatttacatttagagtctgacccaaaaaatgtatctcccgatcttttgctctatagtcctatctttttcatcaaactttgtaaaggagaacaacaacaacaacaaattatggcgtgcctttagtgcacttggggtcactctaggagtctctgttcggtatcctcgcaccctcataacatcatctccaaaccactccaggttggaaacataccctgaagcgtcctgtgtgaacagtagccacccaccaccgcattccccacattagttattttccccttcatggtctgcatctcaccaagacagaagccagaaacttactttcccatcctcctctgcagcaggggcatggtcatgtgacttaggcttagccaatcagaagcaccttcatgggatatggattcaggaacgcctccaagaagtgggcacagcacaggattcatttagtaaaggatggctatgtaaacaaacatccagcttccagcgtagacgtggagcttccagagcagaggctgtgggggcagttaagtcccaggctctgcctgcctttcccaaggaaaatgaccagggttttagggtcatttggacattgtgtcaggctgcaaagtttccaggcctggttctctggttttcgttaatatttttacgtaaatttcttctctgtttatactctctagagtgagttctgttgtttgcagttatgaatgttgactaatatgatagttaacacagcacacctgttatccgaaatgtatgttccctcttacgtagccggcctcataacaaagagaaagatattttctcaaggctcttctatcccctcccatcctggtgtggtccagagaagcatctgaattaggaggctttagaaactttattcatggctgatgtggtttggctatgtccccacccaaatctcatcttgaactgtagctctataattcccacctgttatgggagggacccagtacccccagataatcgaatcatgggggtggtttcccccatactgttctcgtggtagtgaataagtctcacaagatttgttggctttataaggggaaacccctttcacttgattctcattctctctcttgcctgccaccgtgtaagatgtgcctttcaccttctgccatgatggtgagacctccccagccacatggaactgtgagtccattcaacctctttttctttatacattactcagtctcgggtatgtctttatcagcagcatgagaacagactaatacaatgagcagactaattccttcattcaaaagatagtcactgagcacctgctgtgtttcaggcaggacatgatgatacccaggatgctaagttgatcctttcaaaaatccttattgggcttctccctaagttcatgttgtggtgtaaagaaattgtgggcactcaatccctgaacactgaacttgaccacctaagatacagagcagggagatatgggcatcccaaagacagacaactggataaaacctgcactcatgtggctcatagtgtggtcagggagaccgactttaaccaaaaagccacacacactactgcaaagctgcagttgtgacagagcgctgaaggagagaaaaacaaagtaacaggtgcctacacatgggagatttcaccctatgcagaaggtaaagaaagactcacttgaggatatggcacttgtgatggaaacaaggctatgtagtcatcaaacttccattttcctcctggacacataggaagaccacatttctcaaccttccttacacatagctgggcccatgtgactaagtttaggccagtggagtaaaggcagagtgaggtaagccatttataggcttggccatcaaatatccttcattcagtcttccatagccactcaccaccgcattccaatttctctttgaaattggcatcctccattccaagatgacagagctgtgcaatgggaagatcctggatccttgagtgtttgcttcaaagagacacatcagcctttaatagtaccaaaaaggccaggtgcggtggctcacacctgtaatctcagcattttgggagaccaaggtggcgggatcacctgaggtcaggagttcaagaccaacccgaccaacatggagaaaccccatctctactaaaaatacaaaaattagccaggcatggtggcatgtgcctgtaatcccagctacctgggaggctgaggcaggagaattgcttgaacccaggaggcagaggttgtggtgagctgagatcatgtcattacactccagcctgggcaacaagagtgaaactccatctcaaaaaaaaaaaaaaaagtagcaaaaaatagactaattgtgttaagtcattgagctttcaaggtctatttgttactgcagcttagctcatcctaccctaactaatacacagttgagcagagagctgaataatgaataggacctaaatatatgagagaggaagtgaaagcattctagcagagagaatggcccaatgcaaaggctttgtggtgggagcgagaaaagcaagaaggaaaaattgggaaaggccaaggaaggtgaacagagtgagagatggtggattcaagataaggctgcagtggttggcagagacaagactgtgcagcccacgtattggccaagcgaaggcatagcacctgcaagattcatgcctgttcacattcccactgcccagagactctggatgaggtcctgtctgttttcaagaaagagaccctggagttcttcactgttagccttcctcgctttcagatgctgacagccttgagaagacgctgtacttttccgttctacagtaagctgcccacatcaaagcccaagaagccacaggcatttgggggagttgtgggtcagatatttaattattctaatctagaagtctattttccccacactgccaagaacagaaagttcattttggaaaaagagggtagttccttggaagggctgaatctcatctttgatctgcagagctctcagacccacctcaagatttccaaagcccagaaacccacagacactatccctcgcccacaataatggacaaaacaagaagccgctagtgcttgtggtagagggaggtgagggatgtcttggatgtatttcatttttatttatttctaagaaaaaccacctttaagatgggaagatgtgagtggacatacatttctaaacaactttgttgatctgataaattcagataaagaaattactgtaaaaagattgcctcatctacaaagctcaggacatttttttcccttttgctgttttttatctttgagaaagataatgaaagaggaagcttgaaaccccgtttccattgatgttcgaacacacaactgctgggtttaagaaccagaggagatcaaagggaatggggcccattccaataaaattatagcagcgctggcagagggtgtgggctcatttaggaacttggaggcaaggagttgttgacgcaccttcatcagagctgaggacagaaagaaaaatgcctgaaattccaagggattaattaggagtatagctcataatgttacagcagctgcacacacagttagctgatacgcttccctcagtgaacacttcaagccctggatatcagtaccgttcgtaggaaaaatggatggtggtgactcccacttccaaaggagagttcttctgccctgaaaatgtaactggcctaggcccagttacattaagtctggggtgagagattgggaaaaacaaataaatttggaaatatagtggcaagaaaggaaccaaaaacgttttgggtttatattatattaaagtaccaacattttggtatttcattagccccattttacagatgagaaaactgagattcagagaggctgaataattgtgtataactgtgcatagccacttagccagctttgactgaattcttattgctttccacttaaaatgagtattccagtggttttccagcccccttcacccaccggtgggtggggctgccatacccaatacctgactatccagtgtttaggctgttggggaggtatgacaaatcaggtgggaatgtttgggaaaaacccacctgggtagtccttgcaaatgctatcaacgactacataaatctagtgctgctattaagaactgagtctctgtattaaatagtagagatgtgaacattccacactgctgtcctaatcctatactccttagtccatgccaatttaaagggcacaggaagttgaaaagcctagccaaccatttttatcctaaaccagtcattgcaaatgaaaatatgcactcagggatgcaacttctgacaatcagttgaagtagattccacagaaaccaaatgacattagtattagcttaattcaagtgtaatcaggaaggtgaattaatttcaaaaagagggccaggcacagtggctcatgcatgtaatcccagctctttgggaagccaaggtgggaggatcatttgaggccaggaatttgagaccaatctgggcaatatagcaacatcccacctttacaattttttttttaaatagccaggcatggtggtgcacaactgtagtcccagctacttgggaggctgaggcgggaggatcgtttgagcccaggagttcgaggctgcaatgagctatgatcacgccagtgcactctaacctgggtgacagcacaagaccctgtctcaaatatacatatatatacatatacatacatatacatatacatactaaaaacatattttaaagcataacatccctgcttcttcaccacctctttaatggaaataataatattattaacaactagaatttgcttagctacaaagggtactgtgtgtataatatgccatttaaatcttctaacaacctattgaataaagtaatttactatccccattttaaagatgaggaaactgagacttggagggactaaatcattgtatatcaatgtgcctaatcagacagtgagtgggagggccaagatttgaatcccagtctatctgaccactttcctgcctctaatactcgtcaatgctctcagctggctccccaccctgcctctcaagaggaagttcatcaggtttccagcaatagagattgtaatgatcaaatcagcagagaggggggcagaattgacagatgattctagagcagatgatcccatttagcccttgaaaatgaaacttctctgaagaaaagtagccaccccacccccatactttagttggtcaacctacagtagaatgaactactgaggaaagcagcatttctaacttagcagcaaataacagtccaaattttaaacaaaacgaggcgaggcacagtggcttatgccttgtaatcccagcactttgggaggccgaggcaggcagatcatttgaggtcaggagttcgagaccagcctggccaacatggtgaaacaccttctctatgaaaatacaaaaattagctgggcgtgatggcacacacatacaatcacagctactcgtgaggctgaggcagcagaattgcttgaacccgagaggcagaggttgcagtgagccgagatcgtgccactgcactccagcctgggcaacagagtgagactttgtctcaaacaacaacaacaacaacaaaaagtttaccctcccagggtgtactggcttctttgcatcttggaaaagcattcacagtaaaacatattgggatttaatgttacccaataataatgataggctaagataatgtagttaccatgtatcgtgctcttgctaaaaggcaggcacagtgataggcatttgaaatatctcatgctgtctatctaactcacaacaattccataggtaagtacttcctttcatctcatttttcagataaggaaacaaagcatccaagatgtgaaataatttgccaatttcatacagctactaagcggtagagttgggatttgaacctgcattgttccaaaacgtttcctctctccaactacagctgcagttcctgttatgacctgcttctatcccaatcagtttctcctgccccgtttcgagcaaggcaccacaatccggacttcctacccagaaacctgagagtcttgtcttgtcttcacatttggtagcgcccacatctaatcagtcaacgtatactatcgactctaattccattatcagtcaaaagtgtcccctcctgtttggatcctttaccagcagactacaggaatggaaagaaatcaccaccaccatgagggcgttaggaatgataaaagagcatttatggtcaggcatggtggctcacgcctgtagtctcagcactttgggaggctgaggcaggtggatcacttgaggtcaggagttcgagaccaacctggccaacgtggtgaaaccccatctctactaaaaataaaaaattagtcagtgtggtggcacgtccctgtagtcccagctactcaggaggctgaggcaggagaatcacttgaacccaggaggtggaggctgcggtgagccaagatcacgccactgcactccagcctgggcaacaagagagaaactccatctcaaaaaaaaaaaaaaaaagagcatttgtatgtgaaaaccacttgaaacataactacaggtttaactttccccattacaggcaggaggggaaaaaaaaacacaataaattatattttgaaatttttaagtcttactcctactctcattgaaaaatacccccacatctcttgtggctatgaaaattgatacaacctttttgaaaaataatttggccatatatatcaagagccataaaaatgttcatcccctttgacccggtaatcccactcccaggaatttatccgagggaaatcattcaaaataagaagaagaaaaaagagctagttgtgtacagatgttggttacctctttgtaatcgtaagaatctaaaagcaaaataaatgtagaattatagtggaatagtggagccaatttcagtgtagttaactcaatggtatattaggcagttgcaaaaataataaatatgggcactaggtagaacctaggaaaaatacacaggaaataatgccgaatgaaatatatatgttctgtaattataactacataaaaacatatatttttacagatgaaacatgaaaggggtcatggaggaatgtaaacaatgcatatgattgattagcgggattacagacacggcttctttgatgctttagagttggatgaaaatgttataaagccttttggaagctccctaatgaagggagtggtggtgaccatgagaagcgaccccagccccagacctggggagggaaggggcttcctgctgctttctgtgccacgtgtagggaggttggccagccccgcagacaagaccatgactgctctacggtaggcacagccggcagaaccctcagaggcttttcccgtcttgggctgggatgttggtttagcagagtagcgacagaatcaactccttgtctccctggcttctgggtctgtgagagcaacctgaggctctcattttaccaaggtcggggactggatacggaccctccccttaggataaagcctgtccaagttccaaacagcaagcagaagcgcggtcaggcctcccagccaaggtgaggaaccccagataaggatcccggtgagggccagtggaagatcagagagatgcggcaaagctcccacagaaaggattcaaaccccaaaaagccttgagcctggcctcactgcccactgccccatcagggggtgatcgagcggcagtgccaacctagtgcccagccaatctgctcctcagctgagcccactcagccgtcccacacggcagggccctcttccctcttgcatgcctctccctccattttatcctcctcttttcagccctccttgaccccagacctgtgaatgacacacacttaaggacacagcatagtccctcagtgggacccaatgctgagtgatgagtgactcattaggagcagtccttgcagatgcagtgttacattcatccatcatgtccctgctgagcaattccagatctggccatttgctggaggcatggtcgaggctctccccagcgccatcctgtgagtaaacaccccttcgtcacaaacaggatgcgtgccgacactggctttcatctggctgcacacagaagggatggagaatccaggctttggctgatcaaaacagtgggcaggaagccagcaggggtccattgtccctctctgccaccctggactttgctcccacacagctgcctttggatttttaaacagcatttgttcaggagacagtgtttttgccaaggctggcactggactcaaaggagttggaaagtgggtagctcagaatcaccatgattcctcttagctcttccctctcttggcacgtgtcctctgcgtccacaagaagatggacaggtcccacttaccgagaaacttgtggagaagaggccagaattaattaacgagaagatgttgttataaacatttgcttaagaaatgcactcattactttcacgcccaaagataaattaaatcaggcaaatccaggagagactaggaaagaaactgcttcaaggatatcagaaaaatgaggcgtttctgcctatcgtttatagatcggtaggtccacctaagttctcaagggcatttaaaaaatgaaaagcactttgtttgtttgtttgttttgagacggagtctcactctgtcacccaggctggaatgcagtggcatgatctcagctcactgcaacctccacctcccgggctcaagtgattctcctgcctctgcctcccaagtagctgggactgcaggtgtgtgccaccacactgggctaatttttgtatttttttgtagagatggggttttaccatgttggccaggctggtcttgaactcctgacctcaggtgatccgcccgccttggcctcccaaactgcagggattacaggtgtgagccaacacgcccagccccaaaaagcacttttacatattccatttgaactcttcttatactttgcagcatttggtggtggtggtttttgttaatttaaggcagcatttctcaacctgggcacaattgacattagaggctggatcattctttgttgtgagggacagtcctgtgctgtcaggaatgtttagcaatatccctggcctcccctcacctgatcatgttaacaccccctcggttgtgatgagcaagtatgtctctagacgttcccaaatgtcccctgggcaataaaactgccccctcctcctttgagaaccattgatttaggaggaagaagaagttaaggaggagaaagtttgctaattcaaagtaaaattcaacctagctcctgcataagatcatcacttctttataaagagacagatttttatgaatgggatattgtggtgctttatattggagtttgactagaaaggcaaagtttctaatgctgtaatctccagaggaaaagcattcactggaaaaggcaaagctgttaacgttggttgtataggcacatctgaaatgtccctgctttttaaatgacccctgtttgggcaggtttgcttacaaacttacacagcagacaaagtaaggacatttcttttacgaaaaaagattcatcttatggctccttgaaatgagcccccttagaacttttctagttcttagtgttgggtgttattaacttgacagactgtctaggctgcagagaagctgcgaatattaatagaaatgaagaaagcatttataaaattcttattcacatcaattttgtgtaaagtgatatctctctaatggttttacccctgcctttttcagctaacatctattggccaaactggggttcaaaacaaaggatcaggtctctgaaagtattgctcattttacagggattcaccctttgaacactgtctgggcctaacctagacactcggtagtaatgacaaaagagtaaagtattagttacccatgttcaaggtgcacgtgatctgtttggagaagcagaacatgcactttttaaccaactatggaaaacgagtcagacaacaagtgaactctccttttatggttggcactgagaagaacattcttccaaacaggtgaagtaaatcaaagtagacttcctggaaaagggggctttgagtcaggcatggatcagcagagagtctctgcatacccctgctggatcccagggaacactgctgatcaccagagcctgaataagcagtaacttcaaccttctcactttttcctcccctctttcctgtgcctggcagatccttttctgggggttgcagtgggtatagccgtctcctaatcatgtgatcgcatcctcctggccacagttggttggttcagggggtgggcatctgacccaacctgaaaccatgcaaattccctcctctgggaatttggaaaatgaactacaagcttacatttcctgtgactccaagtcacatcctgtttatctagcaaacacatataatgcttactatgtaccaggcactgtcctaagtggttcataaatacaaattcattgaatcctcataaaagttttatgaagtagatactatcattgtccctcattttacagatgggcacacagaggtacagagaagttaagtaacttgcccaaagacacacagctggtaaggggcagagctactaaccatgttgcttggggaattaaaaataagcacaggccaggagcagtggctcatgcctgtaatcccagcactttaggaagccgtggcgtgtggatcatctaaggtcagaagtttgagaccagcctggtcaacatagtgaaaccttgtctctactaaaaatacaaaaattagttgggcgtggtggcgggcacctgtaatcccagctactcaagaggctgaggcaggagaatcacttgaacctgggaggtggaagttgcagtgagtcaagatcgcaccactacactccagcctgggcaatagagagagacttcttctcaaaataaaataaaataaaatatcagcacatccaaagctggaatcgggcttctcgtcccatttctgtcactttcgatttgccctcgcgtaaattgcttagctttgctgcgcccagtttcctcagctgtaaaagacaagggtggattacatcagtgttttccaaagtgtggtgtggtgtagatactggtgggatgagagattataattttttttcatagctatatatttatcttcatgtatattagaaaggacacataatagatgatagatggatgggtagatagatagatagatagatagattttacatacatatagatatccccaaacctgtggtatcacaaatagtattgcttgagatgaaaccagagtgggtagtaacatcatagtttagaagtgagttcaggaaacagtatcgtacaatgggaaacgtggcccttgacgttcacatgtacctgcactgcctgagtcaacatggtttcagtggggatgactccattcctgcacgccaaggtgcatttatgacccaagccggccacagtgattgtcctggggaaggacacgtgattcaagaggacaagtgaggccccctggggacttttgctgggccaatcaggaaagcctggtgctgccaagggcatctgccaccacccagagaggacagaggcaaggcagagacacctttaaaggctggaagagggagaggagggcctgtgaacatgccatctaacctcagagccagtggagctggcattacatacccccggggttttcccttacctaaggcaacacagttttctctgtgctttccactgactctagtttgaatttgttttttgtcccttgctaatagttttgatgaacacaggtaggcaatgcagtcttaggatttagtgaagaattgctactttctagtaccaggtggtgacacccagtttaaaaagccacaatgacttcagtggagagaaaggacagacatcacagcttccatgctgaaagtgatgactctgtctcaggcagcatgggggagagaagagaggccaattttggcaatgactatcctcagcctcggtttcctcctctgcagagtgggaataacaatatctcctatgaatggacatcctagggccaaatggcataacagaagcaagctatctaatgaagtttcttaagtccacaaaaggtagctattactatgttgtgccaggagttttatataaagtattgtaccaaattccatgtgatcctcaccacaatcctatactttaaaatcaccagctttactccagagaaactgggattcaaagaggttgggtgacttgctgtcaagcaaacagccaataaagaacagagctgtccttcaagccagctctagcagacaccacccaaggctgggtgatggtgaatatcccaaggttttggaagcaagactccaaggagccagtcatcaggggcaaaggaatgtgaaagccactggtgggggcaagtgaaccagacaagatagcagaggaaattccccgagagctctccttacttcctgcccactttggaaagttccttggaaaatcctggggctcagatttggaggaaagtcagctttgtggaacaaaggcataaaataatccagcaaagcacccagccccgatgcatcaggaggaactaacattaatacacggccacagatcccagatgttgttatggttggattacacggacttggaaagttcaggcatgagatgcctgaatgataacaatagaaaacagatcaaaagcccaaagaaagaaatcaagagaaatgaaaaacagaaggaactgcaggggaagatgaaagaggagaattataatttgacactgaaggggagccagtgtttaaggtttttctggaagttgacccacagccagatgagaattttgtagcattattggcagtatgaagttacaatccttgagctcttttgtagactttggggacctcagggttaaaagacttccctgagaatctcctaaatccacctcttcctttaaatcatcctggaggtgttcagtgcctgaatcttcatagaccttgtcatattcagctcgtccatcaataccagggagagcagcaaggtataggaggaattgaagctaaggttgtacaatccccccggccacaatcccataagagtctctttgctccaaatgtcagaaaactcccagtttctcggttcaggtaatagagaacctaatttacactgacaaacaaaaaaggaaatgaattgactcagaaaaccgaacagttgagagaggtctaactagcttcaggtatggtttgatccaggagttcaaaagatgtcacagggctcagtatctccatttcactccatatttgcttttgtctcaagctccacgtggtgacaaaatggcaaatttcatatttgtattctcccatgtttgagtccaacagaaagagaatatgcctttctcccaaaagtctaagcactaggctcatcaagacccgttggctctaatagggtcttatgcccatcccagtggctagaggaatatgatgctctgattggccaggcctgtacctagaactagtagcaaagtcaactccatccccagcctgagaacggagagtggaagacaagtgtttccccgagaaaaagtgaattgcatcattaggagttggtaaatgaatgctgggaatcaaaaaataatgggtgtctactatttcccatcccacctctgtctcctgcatgtgactctcttttgcaattttctctcctcacaagaaaataagaagtaacagcattatcatctggtcctgaaatatcaatggcatatacaatttctccttgtcaattaaaaatctaaagcccaagtcattttacatttgcttttccaaaatgtattaaattggatgcctttaagtctttatgtacagtacataaataaacaaataaaaatataccagcagcggcagggcacagtggctcatgcctgtaatcccagcactttgggaggccgaggcaggcagatccctggagttcaggagtttgagaccagcctgggcaacatggtgaaatcctatctttacaaaaaattttaaaaattagctgggtgtggtggcatgcacctgtagtcccagccacttgggaggctgagatgggaggattgattgagcccgggaggtcgaggctgcagtgagccatgatcaccactcactgcactcaagcctgggatatatatcatccacataagaaccactcgttgacatctgcttttgaccatgcagtgtcttaagcactaggggatacaaaagggatacaagaacccagttcctgttgctgagaagcccacactctaataaggtttaggggaacattggccttaacggcaaaatatcaacctgaagtttctcattacactttttcagttttttaattaagtctctcagaaagagacctgtcctggcacccttccatccctcaaattttaaccaatggcttgacagttaataacatatttttacatttatttttgtatctgagactcccaatatctctaggagggttgattctatttttaattggcattttatggataaaggagagaaaagttcagacaggttgagtgacttgcatggagtcacacaactaaaaagtgattatacccaaacttgacatccgctccctcattcctacccctagtcatgtgaaactacctgaagtcaaaaacattgtcactaacgctggatacagaggaagccagaggtccaccaagaggctgtcccaagacagaagagctcagaagccatctgaggtccatgctgttattttgcattctgtactactcaagtcacatggataaaaacacaagctttcctccatcattctcagcaagctaacacggaaacagaaaaccaaacactgcatgttctcactcataagtgggaggagaacaatgagaagacacggacacagggaggggaacatcacacaatggggcctgtcagagggttgggggcaaagggagggagagcattaggacaaacgcctaatgcatacagggcttaaaacctagatgacgggttgacaggtgcagcaaaccaccatggcacatgtatacctatgtaacaaacctgcacattctgcacatgtatccaagaacttaagataaaatttaaaaaaaaactgtaaaccttcctaaaatggaacaaggaaacaacagcctttatttctttgtttggttggcctgtctactggatgccaggctctgggccaagccctgggattacccagacgcaatgagtccctgtcctccaggaatacacgttcttgggaagtggaagagaaggactcttgacaaagccatgtgatgaaggcaatggttaagaagtgcccaggcagctcagggagctgggaggaatatacctgctcagactgggaaggctgcaggaagagggagaaggtgggagtctgtcaggtagcagggttggacatgggaaagaaggtccgtgtgaactgaagtgaagagtaggaacaggggtcagggagatgaggctggtgattctggcaaagcttaaatgggcacaaaggagatggcctgactgacccttgaaggccatcggcagctccaaagaggacagaggcttttattgttttgggttccttccagatgcagtgcagtaggtgggttggacatgggcacgtgtgcaggtggagagagctgttaggaagctgtcaaagttatccaggtgagaactaatggccaccgaagctaagcagtgctggggccatggggagaaatactcaggttggagaaggattccagggcaagttcagacaaggccaggagggctgctatgggggagcaggagagtggagattcagatgtggcaaccagggtcccagcacaagtggcgcttttgtgagaggggtggagggcaagagagaggaagatatgagatattttatgatgttttgagattgtggtgcccacaggaaagaaacgggacaagtccagtgcgctgtggaatacagaggagtggggcttccaacctgggctggaaagacagctgggagtcatcccaggatgtccacagccacgaatgtgagtggtgactagagcactagattgaatgtatcactcaggggagagtttacagaacaagaaacaggccaagtataaagtcccaggagacaaataaaggggtatgaagaaaacctggagagaggggtgacctaggagcccaagaagggaaagcttcttaaggagagggtaatagtcaaagcctgcgggaaaattggtcagataaggactaaacagtgcttactggattttgcaataaagaagtccctagctttgctggcaagcatgtcagggaaatggtgggactggcagccagcacgcagttgatggataggaagatggtaggtgatgacatggccttgtggctgaggacaactctttcaggaagcttggcagggaagggacggagagagatagggccacaggatggagagagggtttaaggcttagaggtttaggctgttgtcattttaagagagtgaaaggcttggacatgtttataggatgcctaaggaccctcagcaggtgggaagaggattgattctgagtttagaaggcaggatgcacctcctcttctgaggctggaggaaggaagagaagggagcatcaagatttagataaatgtggccgtgtgaagacaagatgtcgagagaggtcagcctgataagctggattttctcaaagaattagggggcagaagtgtttgccaaaagtgaggggacaagcatggggtgaccaggctagctctgagacagtggtaaagattctgagcagcaccagaggggaacaagagaggcagctgagcagtgccagaaccatggagcttaaaggctctgaggttcctagtggaccagagcagcccagttgtatggttttccaatcttttgatctggaattcatggcaagatcagtagggactgggccgaaatatcttgcttatgaagaaagaatgagctaaaccaataaagacaataaaattaaattaaagagaaatgtttaatctactcgagggaacaaacttttcagcattttggcaggacctgtctacagtccaagtgataggattatataaaaagacactcatccattcattgaggtaggtctgcagaatttctacttgacaacacctcttaacctggattgctttactaaatgcttttggaagtaaaatcttcccaaatgtaccctaatttatacttttcaataattcagatggggcaatgggaattactaaaaatgcctatcttaaaatttaatagaattttacattttaacaaattaatgctaagaactgaaataccagcatactggaaagttaaagtcacgtaaggtatgcaggcagcactctggatatgtgctttagactcggagcaacagtcaacgtacccctcaacccaaaacagagtcactacagggaaggactagggagggtgagcaaaggcccatcctcccagcccttaggagcactgtattctgtaagataagaatgagggtgggggtaggaaagagacccaacctccctgatagagaccactgaaaggagctgctgttaattagcaggcaccctggttggtgacaaaagcaagagtccatgtttattgaggatcccctctagtttgactttgtgctaaagaatttacactgggctatcttaggtgattcaaacaacagcttatgatctacttatggtcctcattttggagatgaaaaaatggcgatctattgaggtgtagggtacatctaaggtttcacagtcaggagggggcagagccaggacagaagcccagatttatcgttttcaaggccagagttctaaaccacggtgccttactgcttctaaccttacatgaagtcaccactgcccacatttctggccgtctcagagaggcccaagcacctacagacaagcccatgggctttgaagcaggcactgagttccgagcataaatattaacataactgtgtgggggccacttagtgacaggaactttcaatggaaaaggtggttgctcttttccaagcatgatatcttatagctggggtgctgtaagatgtgagagagggagagtcaacaagattgtgtgcccagcacaaggaaggcactcagttatgtcgtagaggtgagaaaagagaagcaactttggcaggaggggaggaggtaagaaagattcctggctactgagcttgagatagcaggtttcttctttctacaaacatgtatgcagttcctaacatttgagttcctaacattcttaactgcagaaggaacttatgcagttcctaacaggtgccagattcttttctaggcaatgaaatgattgaggggagggggtggagactgtgcctgacctcagagaaccacagtctagaccagcaaggacggcacccttacaataaagtatgaagatgccatggccaaggacacctggggcatagagtataaagaaagagtgggaaattcagcttgggggtgagggttagggatggacagattttaagggggttccgtgagccccacctgtttgtatctatgcccttgtgggtcccttccccttgagtgtgggcataacctgttaatcacctctggtctacagaatgtggcaaaggtgaagagatgtgcatgaccacgtgtatgtgactaagtttacaaagcccgtcttgtgaagagacttcctcttctttgctagcttgaaagaagcctgctgccagttgtgagctaccatccagagaaggccacatgacaaagagctgagggcagcctccagctgacagctaacaaaaacaaaacaaaacaactgaaggctttaattcagcagcctgcaaggaactgaatgccgccaagaaacacatgagcctagaagaagatccttccccagtttagcctcagaggagactgcagccccagatgacacctctattgtagccttgtgagaccctaagcagagaacccagataaactgtgctcaaactcttgacccacagaaactttaagataaagaatgcctgttgttttaagcagccatatttgtgataatattgtcacgcaccgatagataattaatatgggggccaaagggaccttcctagaagatggaatcttaatgtctttctttcccaaactttagccatttggctctacctttcacagaaagactagtctatcctctagggtgattcctcttctcgggtttttcgaaacagcccaggttttatgtgctattcctattttctaaataaaagtgattccttctatgtacaataaaatttaatagaaaatacatcattcatgtcctaatttgtataccagtgtaatacattttggtgggaaaaaaaccctcgcaattcaggaaaacaatttttatcagcctatgtttcttcatttggggtttggaaaatacaatttcacctttcctttttctgacactggggaaagccacaaatgtactaaagttgcagtttcggaaactgagtacaatgttcaggtaagaaagtttgctggctcaagcaaatggcattctgtctaaactacaggccagttcgacatgatttctaaggaaagagaggctattcttgccaagtggccacagtcatgcctaagcgtacaggaggcaagcctagttggccaacccagagggaaagagaaaatgcaacaagttagatggtgagagtttcccaagaagttacttttttttgagacaagattctcactctattgcccaggctggagtgcagtggctcgatctcggctcactgcaacctccacctcccgggttcaagcgattctcgtgcctcagcctcccaagtagctgggactacaagtgcacgccaccacgcctgactaatttttgtatttttttttagcagagtcagggtttcaccatgttgcccaggctggtctcaaactcctgagcttaggcaatctgccctcctcggcctcccaaagtgctaggattataggcgtgagccacagcacctggccagttaccttgggttttgaaagcagaagggatagaaaagaggctctggaagaaaccagggcaatgcggatgctggatttcagggagtgcttggaatgaaaacagttaagggaaaatgcagccagatgcttgaaatgaactatgggtatgagaaggaaacagcagagaggagggtctgggtgtcaaaaggacacggggatagatgtgcctgcctctgggacaaaggaataggcaaagagcagggcaagagagaaaacaagtagagacacagagggcaaagaaggaagaggacaatgttgcccaatgcaaaagattcccagaaagatcaacaagaatatgcagaagcaaatggagcaccataacataaatgccacagaagcagggttttatctattttggtcattgccatatcctaggcctcaactctgtctgccacagacactcaataaatattactgactgactaaacaaagactgaaagaagtgggagaagataaaactaagataccaacggtgaggcagaagagaggttttactcagttcatccatccatccattccatccacaaacagttgttgactcttttctttgggctcagcactataatcatcgggaataaagccacaatcaaaagagccaagacaccctgctcttgggaagttcacattctacttgggaaagacaggtgtcatacaggcaagcaaagaaagtaaatacaaaattttaaaaatgctatgaaggaagcgaatcaggattcagtaggggagagtaattgggtagggggcaatgagcatgtggtcagagaagatctggcagaagaagaggctgctgttggagctagaataagatgataagcagtagccagttatatgaagagatagtaaaagtgcatcccagtcagggtgaacagcaaacatggtctctgctgtgagctgaatgttgtgtcaccccaggattctatgttgagacctaatcccctatgtaatggtatttggaggtggggcctttgagagatagttaggtcatgagggtagatcccttatgaattggacctagtgtccttgtaagaagagacatgcaagagctgatttctttcttggctgtgtgaggttataagaaggtggctgtctacacacaaggaggaaaatgctcacagacaccaaatctgccaatgccttgatcttggacttcccagcctccagaactgtgagaaataaatgtttactgtttcagacattcagtctatggcattttcattatagcaacccaaactaagacactctcaaagatggaaatccatttaggcacacagagggacagcaaacagtccatgtgggtacagtagtgttcaaagcgggggggcgtgtaaggtgaagtcctgatgctagcaggaaccagatggtgtaaatggcaaggaacttgagaagataacaggggtgaataaatgatgtcatctgacttacttacttgaaagtcactcttgtgtcagggttgtgaaggggcaaaaatagaaatgaggagacaacataaggggactgatgagagaggacagtggcttccaccactgcaaatggtggccctggggagcagagaagtgggcaggcttatgacctgcttactgttattatcgccctcatttcggagatgaagaaatggagatctattgaacgtaccttggaaaaggagtggacccatcttgctgaaatgttcaaacaaactggaaaggaagagaatagatcaagaacggctggcatgttcctagctaagaactggatggatggcaatgccatagcatgagatgggtaagggctgatggggaccatgctgaggagggtgctccttggggagatatgcagagttccatttaggactggttgagttgagatgtccattgaacatctaaatggagacgtctacccacttgggtggattgggagttatgggcccatatgacaccatgcagagagtgtagagagagaaagccattgatttaaaaacaaggtttttttaacaagacagttttttccaggccgggcgcggtggctcatgcctataatcccagcactttgggaggccaaggcgggtggatcatgaggtcaagagatcaaggccagcctagccaatatggtgaaaccccgtctctgctaaaaacacaaaaattagctgggggtggtgacacgtgcctgtagtcccagctactcaggaggctaaggcaggagaatcacttgaacctgggaggcagagattgcagtgagccgagatcatgccattgcactccagcctggtgacagggtgatactctgtctcaaaaaaaaaaaagacagttttttccccctttcaaattagctaaaatgaaaaagaatggaaaagactctgtttctcagttttggcaaagatgtggcaaaatggacactctttcaaacacggctaccaagtgagcaacagagcaatgtgtatttaatgccttaaaagtcaatatatccttaaacccagcaactacagttctagggatttggtggggagggggggatgtggaatgtgcacaaatatgtctatccatctgtatgctcatggtagctttctttaaatattgagaaatagagtagttcagtacaatggagtaccacacagccattaaaaaaatgatgtggtaaaattttactattgtgtcagagacaataacgaaagattttgaaatgagcaaaggggtatggaatgtcatttgcatggaatgcttcgtggcatctagtgggccctttgaggtaatctgattctataggtgtctccaccttgcattgtctttgatgaggctgttttgcaactctccaagttgaaaaaaaaaaaaaaggcagtcattcaaatcaatcttattcatagaaatacaaatgaattttgccctaattgttgctaattgttgtccaccctgcagaaaatatgattccaaatgtaacattttatggccgtggagatagtaacccgctttgcatctgttaacaaatcattttggatatttctgatggcctacaggctacagtttcaatgtgtcccctccaaaattctggtgttaaaaattaatggcaagtatgctagcgttaacaggtatgagcctttaagaggtgattaggtcttgagggtctcttgctcgtgaatgaaattaagacccttataaaagaagctttatatagcagtcagctctcttgccctccaccttccccacatgaggatacagcgttccttccctccagaggatacagcaacgcggtaccatcttagaaacagagactaggccctcaccagccttcatcttggactccccagcctctaaaactgagagaaagtaaatttctgttctttataaattaaccagcctcaggccaggcgcagtggctcatgcctgccgggcatgagcattataaatattataatttataatataatataatataaattatattatttatataatataaatgctacagaccaaggactggaaaactatgggttgccaggcaaatctggcctgccaactatttttgtaaataaaattttattggaacacagacacgtccatttctcttcatattggttttgtactatagcagcaaggttgagaagttgcaacagaggccttatggcctgcaaagcaaagaatatttactatctggttctttaatgttaatgtttactgacttctgctataaatgaaaaactattacaaagcaggactccaaaaatgcattttatgtgcatacacaacacacacacacacacacacacacacacacacacacagagtcgaaagtgcaggagggtataggtatacagtaaaacattttctaggaatcattgtggatttgaacatcttgcctttatactccacccgccagtcatgacagaatcctctgaatactaaagggaagtccaaccttagaattctcataaaatgtttaatataaagttatttaaaatgattcatgaaagctgcaagatggggtggacttggaatcaggtaactagtttgtccaagcttgcccaagacttatccagttttaaaactaaaaagtcccatgcccagagaacctcatcactcccaggcaaactggggccactgatcactccagcgggaaatcgtatactatcgtggcttaggtcctagatctgctactcaccagccacttgacaccatttaccctgtctaagctgcacttacttcaactgcaaatatatactcccctgttctgatatcaccgtgagtatgaagtgagttagtgcatgcatgtgtgttcagtaaaccatgatggcaaacaaaaaaaaaaaaggtcattatcacttggtcccctacataaaatgatgcaacggctggacattgtgtgacattacaacatagataggatgagaggaaattacctagaaggttgtcatgtaattataaggttaccacataatataatttgttgtctaaaccaggacagtgttgagagtggaaggggcacccaataatgacattggcataacaggagtaaaccaagcccatcctgggcaagcctgtacatagtgtcagggaccacagggtaacatggcgttaaggctggcttcatgggtgtcaacctgtacagtcacacacggcctcacactcagagggccgtgtgcttggtttcatgctctgatacttcagagcgtgaaaaattgctcttgaaatgccgtcttgaaattcttaataatttttcaatatggggcctcacgttttcattttgtgctaggccctgcaaatgatgtaaccgatcctgcttagggagaatcctactgggcagcgagaccagatggcatgacctctgaaacccattccaggcctaggcagctaagcttccccaaggagaaagtttcagttttaacatcagctagttcagatcccctggagttaaaaataacagtccatgatgaaggaaaggatggaggctggggtccccaggcgtcctccctgcccactcagagcagataccggcctgctgtgaggagcctgccaacacaagctcagaggtgctgctcaggttccacctcacgcctgtttgaactctgatttcatccgtggccaacttttctgcaacctggtaaaggcttgggcaactcagcagccagatgaaccctagagggcactggagtgttagccatccctcaaagttaaacttaccaatctggcaacccccagccccactaatgctgcgaatgccatttatggggctttcaagggcaataactgtaaaatccagctcactgtcttaacaaaccagaacaaagccgggtggcattgccagagaactgcagctgcttgcactgcaactaaaaagtcgatcttaaactctggggcgaaccctagaaaagacagcaagaagtaaaccaatagaaaaaccactccaggtttattctggagaagggaaggggccgtggacactgaccgttttcaggttgcacctcccagagccccagtcattcccattagttacaacagactttcccaaccccagtgctactgacttttgggctggatcacgctttgttgtgggagctgtcctgtgcactgaagaatgtttagcagtgtccctgccctctgcccagagaggccagtaccacttcccccactctcccacacattgtgacaatccaaaactgtctccagactttgtcacatgtcccctggggtgcaaaattgctttcagttgagaagaccttgtttacggcataaaagatcgtctacatgaatgttgattatgggaatcaaatgagtttagaatggttcatcctcttaggacagtacctaacaagttaagcactatataagtatttgttaaataaatgaaaagattgcaccccactacccccacccagcccacatgccagcaggagcgccccactcaccctacatagcaatcattccatgcgcttctctgtgtctctacagcacctccacctctattttttgcttttgcctctatttatagctctgccacttgctaccagggcaaatgtcttcacttctctgagtttctcagctgaaaacagaacatcttattcatctcatggaattgttttgataattaaatgtgttcctgtatgacaggcacctgcaacagtggcttgcacacagtaggtgctcagggcctaatgaagaggtattgtttttaccacccaacattgcctgacaggtgtttgaacaaaaaatgcacctacattgcatggacactgtgtgtgtgtttaggactagaaacttggcactggattccaaagaacaacatgggatttttctttctcttccctctctcgcttataaatgagggcacagctgggttctgtgataaaatgcccaactccacctgctctagatgttgcaaaggtaagtttgggctcctataattctgctctgtgacacacctgcttctgcagctccttcctggggtggggagtggggtggggacacctgatcatagggtgagcaagcggctcaccaggaccgagggggtttcagggaggtgggactttcagtgctaaaacccagaatgtgctggcccaaccaggataagttgatcaccctccctgagagtttgggattctatgaggactcctgtctagagtgcagcgccactgcgagggtggtcctttattgtcagaaacctcattcccagaaggagacatgcagtggaaactgagcgtcctctgccctgcggtgcccagctccattcaaggcaagcttggtccctctggctttcacggggatgtgaacaccttgccaggctcctctctgctccttcctcactccttggcactggccttggcatcctctagctgagcccaggtcctgtccctgaagagctgccgccccagccccactgccagcacaacccctcccaccccacctgtcccagggccacctgtgctcacttcggctctatctctgcttgggggccactctaacactggttctcttttcaccttaaaaagagttgctggaaccaaaccccagtgacttgtcagcattcacgccactccttccaaaccctccagaaagcacacctgtggatgagaggcgcaattaacgttatcagtcgtgaaggatcagaaggaaaacccagtggccgttgggaattgtgagtgccataaccacttcaagcatttggggttttgttttattttctctggcctggaggggtgtggagaggggccatatataagacaaagccagttttctctttttgagacagagtctccttccgtcacccaagctggagcgcagtgacgcaatctcagctcactgcaacctctgcctcctgggttcaagcaattctcatgcctcagcctcccgagtggctgggactacaggtacaccccataatgcccggctaattttttgtatttttagtagagatggtgtttcgccatgttgggcagactagactcgaactcctgacctcaagtgatctacccaccttggcttcccaaagtgctggaattccaggtgtgagccactgtacccagcccacttcaaatttaccactccagacctttgttctagatggggagaactggaccctatgggaaatcatacggatctgaaattcaccccggaaactgacctggggtgaggacaacaggtggaatgaaaccccaagcagaccctatagaggcaaggaaggagattgagacccttctgcagaaagctgttatgagcctagaattttaacttatgctattgacaccatgccaagcacccaaggaaaaggaaagagaagaacctacaccgcctcctccttgctagtgagtgaggtaaaatgatctggggaggaaaaaaaacaaaaaaaatgaggtgagaaacaccagatggagcagagagactgcccagaaattgctgcttttgtcaacctagatttgtttgcaggtgagtgcagtgttgatagaaagcaagtctatttccagaggggatccccaggatctcctatcaaagagcaagctctggagctagtccccagatgcagacagatctactgaccgaaccacgatcactccaaccccaatctcccaagaggttctgaggatacaatagttctcaatccttaggtacacacattgttcacagggagtgactcggtggttattaatggcttattaggctgttcttggaggtaatttacatctcgtttgagcctctgcttttcaggcatttttctgcaaatggctgtaggcttttttctaaaaaaaaaaaaagaaactaaatccattgaatactcatgcatattctccaaaatgccttaaatcagtacctaaaacttgaaactagtttttcccccattgaagaaattatctggccctgatctctcttacttgctgtcctgtgattgaaaagaacttttgtgggggaatttttaaaataattgccaccaaatacttcaaatggaattcagatagcagtctatttcacgtttcatgcttttgtgacattcttgctcaggaatgaatcttttatgaaaggtctattttaagttgcaccttccagaactttatttttgtctctgaaagaaagaggcagagcagaacctggattcttccaattcaccgatttactgtgagcttaggattggctctcctgggggtcggcggggtggggggtgatgggcttccagcagaggtggggggcactggctttgcactcagccttgccgttttttttcaatcaggctgttttattcaactgaaaacaaccccccgaggatttaagcacgccttctcgcgctttctccagctcctccctgaaggtggaaaaactcacttgatcttaagcaccaactgctgtccggtcaaatttctcacctctgccagggagccatgccttcgagttcccagcgcctcgtggggtctgcaggctggttgtggcctctgtcagcggacccagagttgtttttccaggtgtgggggagggcttcccctgagccttctccgcccactcctgtctgttcattccacagatttttttactaccttccttaagagaaagtatctaaaaactcataaatgaggcaaaaagacaccttcatgccctttccccaaagccaccctagcattgtgtaataagtcctgtgttagattgggttcccttgataccgactctgagacaggcaggtgcaagaccagggtgtactggggctgctctggggaggaactcttgtggaaagggaggcatgggtgagggtgaagctcacccgcagtgaggctgccgctgaggcctcagcctgtcccatggaaagctctggagcccaggtggccatcggtgttgttgcaaattaaggcaagagcaccaggctttgtatcacctgttcaagaccaaccagaagtaagggagggaaggtatacacgtgggggaggaagtttccttccatctcaggtgatttccaggtaagaacagagctgtaagccatctacccatatcagcagctgatactcccagcagctgtggggacagggctgaaccccaaagaggggatctgggtaatacccgagggtccgtcaatgtgaagggatgggcactttgacttagtacttattgctgattaaggcccagattctagatgctaacttaaaggaaattgctaagttgcaaataatgtttgtctggtagagatgcaaacaattcctgtctgatagaaaagatagccccgggctgggcacggtggctcatgcctgtgagccactttgggaggccgaggcagggggatcacctgaggccaggagttccagacaagcctggcgaacattgcgaaaccccgactgtactaaaaatacaaaacaattagccgggcgtggtggcaggcacctgtgatcctagctactctgaaggctgaggcaggagaattgcttaagccagggaagcggaggctgcagtgagccaagatcgcgccactgcactccagcctgggccacaagagtgcaactccatctcaaaaaaaaaaaaaaaaaaaaaaaagatagccccgaaggttatagtttcattgtcctatatataggacataaaccagttttgaatttgatttagcaaaaccattttcagtactccctctttcaatggctacatctacgtgagtctgtcatatactcctgggaccaatgttaccatcctgctggtttcctactctcttgcctcaccctagtcctggccccagcccccatgttccctatatttgcctgagtcatgttttcaacattttttttttttcgagacagggccttgctccattgcccaggctggagtgttgtgattatagctcactgcagccttggcttcccaggctcaagcaatcctcccaccttagcctcctgagtagctggggccacaggcatataccaccacacctggctaatttttttttaatttttagtagagattgggtcttgcagtgttgcccaggctggtctcgaactcctgcactcaagtgatcctcccaccttggcctcccagagtgctgggattccaggtatgagccactgcaccgagacatgttttcaactttgacatctgtgagtgcctcctctagaaacggtgttgatgcagccaccctctggtgagctctggtgatttgtcagggtctgtacctcactctagatgtgatcagaggtagacacgtgcctactatgatccaggcgttgtcccagatgcaaggatgaagccaagaggctctacaggtgtgttgcagctgagaccctagggccagtcaaagctgggctcaaacctcactgctcactgttagccatgtgatcccgaacaaatgattgagcctgtctaagcctcagttttcatatccttaaaataaggctagtaacaatgagtgccttgaggaactaatgcccataaaatgctttgtctagggaatactatattcaatgaatggcagatattatcaataaccattctctatttttattgtggtaaaatgtatgacaaaattcaccattttaatcattttcaagtgtacagttcagtggaattaagtccattcacattgtggtacaaccatgaccaccacccatctccagaatgtattcacctttccaaactgatcctttgtgcccattaaacactaactctccattcccctctccctccagtcctgggtattcactattccactctctgcctctatgaatttggctactctgggtacatcttataagtggaatcatacactatttgtcctgttgtgtctggcttttttcacttagcatgatgtcctcaatgatgttgtagcagtatcagaatttcattccttttaaggctgaaaatattccattgtatgcctgtatatcactttgtgtttatccaattcctccatcaaccaacatttgggttgtttctaccttttggctattgtggctaatgctgctacgaacacagggacacaaatatctgttcaagtatcttcttttgattctttttggcatatacctagaaatggaataactggattggatagtaattctatatttaattatttgagaagcatccatactgctttccataatgactgcattatttcacattcctgctagcgacgcacaagaatgttaactttcccacgtcctcatcaacacttgttattattttctgttttttgtttttttataacaggcatcctaattggtgcaaactggtatctcatcatggtttttatttgcattatttgcattttcctaatgattagtgatagcgagcatcttttcacatgtctgttagccatttgcatatcttctttggagaaatgtctactccagctctttgcccatgactctcattgggttgtttgtattttgttgatgttgaggggtaggactactagctcttcttttttttttttttttaattgagacggagtctcgctctgtcacccaggctgctctgtcacccaggctggagtgcagtgctgcaatctcagctcactgcaagctccacctcccgggttcacaccattctcctgcctcagcctcccgagtagctgggactacaggcgcccaccaacacgcccggctaattttttgtatttttagtagagacggagtttcacctggtagccaggatggtcttgatctcctgaccttgtgatccgcccgtctcgacctcccaaagtcctgggattacaggcgtgagccaccgcgccgggcactactagctcttcttaagaggaggaaagccactctgtgtcctcccaacaaacactcatacacacactccaggcgatggccatagagtcgagccaatgggacagaaccctgaaacacaaagcaaggaagtgctgcagcagtgcacggacttgcctggaaatcagccccatgagtcaggggtacaggctgtactcataagcgggatactccagccagcctctgagcacactgggacattggtttcatgagtgcagcacactctaacccagtgagataagaggctacagatgaagcaactcaaataccaagacaacttggctcagcacccgctgggagaggacgtggtcttttcactccagcttctgtactgggctcgtcaatctcaccttgctgagaagctgaacaaacccgggcctgctcttctcaccctacctgatgccaaggcgatgaggtagccagtgaccaggaatgtctgagcttaaaatagagatgccctgtgccaaaatgaaggctttcctttggagtaagtagaagcaccctgatgtcttctaaaagtctggtccggtttctttgggccatgcatctagcccagagcctggaacattagaaggggtttaacaaaagttgcatagaactttatggccctgggtgaaacctggggagagcccacagaaaagtgactctccccctttgtaatgaaaatcaaggcacccgccttcctgaaaatctgacatcctcacagccatctgaaatcgtttccatggcaaagcaatgaacaacacattatattcatattaattttctagggctgccataacaaaataccacaggcggggtggctgaaacaccagaaaaagttctggagcctagaaatcaagctcaaggtgttggcatgggtggtttgttctgagggctgccaggggaaatctgttccgtgccgctcacctgacttccggtggtttgtattctttggtgttcttcggcttctactgcttcacctcaatcctggcttcaccttcacgtggtattctccctgtgcttctgtgactttccatagtcatcttcctatatgacgccagtcatactggacaagtggcctgtccttctccagtacagcctcatctcaacttaattacatctgcaattaccctgttcccaaattaggtcaccttctgcaggactaggggttaagacttcaacatatgaattttgggggacacgattcaacccataacagcatccaaaatctatttcagcctgtatcaaaacatcttacgtacccctaaatatatacacctattatgtacccacaaacaatttttttaagtaaaagaaaatttaaaaatgaaatctatatctgtcacctcttttcattcggaaaagccacaaaatagcaatgataatatttcccaaataatgtttgcagaaggtttcttttcatttggggaatccctaccccctagcacaggccttatagaaaaggtaacaacacaggtttcagagtcaaacaggctttgccttgaagcccggcctcaccatttccttcctggatgacctagaatgtgttacttaacctctctaaggatcagatttctcatttatatacagaagataaaaatattgggttggtgcaaaagtaattgcaaaacccacaattacttttgcatcaacactaataatcaaattgcagagttgttggggcaaagaaggtaacatgtattactaatccataataaaagcttagatgcatcagtgtgggagaatgctaattgccgccttttctcgtagcaatagagaccccaatttttagtggtatatgactacccaacttctccatgctgctaagtgtgatcctgtggccaagttcagccaatggcattgaagtacacgcgtcaagtggcagcttctaggaatcttcactaaagcgaacgctgtgcacactctgactttcttcattatctcttccacctgtctgttgttgatggacatgatggctggagctggagctgccaccttagaccatgaggtgacactgggaatggagacatgtatggtggaccaacaagacagaaggaatccaggtccataatgcttcctagagcagagccccacacccatcctggaccacctgcctctgaggttttatgggagaaagaaacaaattagcatcttatttaagctgctgttacttgggcaggggcggccactattacttggcagctgaacctaatcctgactgatacagttgggtcctttccctggctcataccaagtgatccttaaatgtgtgttgaattggattatgcctgtggtgttgcatccaatttcacaagtttccatagttggacttcagggttaggcgttctgtctctgaagagcagaggggcaggtgcctctccttcaatccatgtccctgtgcaagtagtggtgagtttgtgactcagaataaaaacccctctagccctttgagcacaacggagcctgttactgaaggcctgtgcggtagtttgttctatttgcagtagaatgagggtgggtaagagggacgaagagaaagaagtagagaaaaagcaaagcagttctctgtgccattccactttctctcccaatctcccaggaatagggatactatttctttttttaatatagtgctttttttttgtagaaatacagggtctcactaggttgcccagactagattcaaactcccgggttcaagtgatcctcctgcctcagcctcccaagtagctgggactacaggcatgctccaccatgcctggtgcagagttgctatttcttgaatacagtttatatccatgattaccaatcctgcaggccagagaacatttaccctgctttgtacacagtgttctacggtttgctcaaggctcacagctatggaaccacagagccaggattggagtccacgtctgctgggcttcaaaacctgagctctcctcaaacccacatattatacatctcccccaaaacctatccatcttgctgtttggaaaaacttgtaatcccaggcctgcaatcaagttgttctgagttgctgtgacagcaggagcccaccacaatccaggacacacaaggtggcggagaggatgggcttccaaatgctgggatatcaaagtacaaatccctgctctccggctcagcatttgtgtgactttgggtacattcctcggcctctccatattcatttcttcatctgcaagcagtaagaacacccatctcaagggttttccatgaaggctaagttttaaccaatgtgataacttatataaagtgtctggcaaaagaaggagcttgtattagtccattctcacgctgctataaggacatatccaagactgggtaatatataaaggaaagaggtttcattgactcacagttccacagggctggggaggcctcaggaaactgacaatcatggtggaaggggaggcaaacacgtccttcttcatatggtggcagcaaggagaagtgcagagcgaggcagggaaaggccccttttaaaaccgtcagatctcatgagaactcactcactgtcatgagaatagtatggggggaatcacccccatgattcaattatctccctgtggtcccaccacctgggattattacaattcaagatgaaactttgggtggggacatagccaaaccacatccgagttcaataagtataactagtaactctcttccccttggttttttctagaaattctgcctagtaagaaatacgcgggaacacatggggcaaatctaactggtccctccaaaccaccctcaagccctttctgcctcttgcatggcatcctgggagagtggatagagatgagttagagaattggaaggcccacgagccagtcctgtctcggccacttgccagctgggtgaccttgggcaagaaatataacctctctggagacctggagattgcacactgaaagaattttataaatgataaagggctggtcaaacaaagatggtggcacagctctcagatgtagcgtggggatagaagccatcactccacatgttttatttttagaggacagctggacaaaggactctcctccacaaaagactagggaaggcagtttggttaatggtccttcacccacaggccaaaaggtgaaaggtcacagcaaggccttgtctaccaggaggattcctgctgggaggcctgggggctggccgcccttgcaggcccagagcgactggttttccaaccaaataaaaggacactttgtattcaggattctagggaagaataaagagaaggaggagagtggcgagactgaggctcccagagtctcccccttgcttcctcactaactgagcagaatccagtggctcatttaatggcggccatcattgctattattagttaatacctactgaacactatctagggcccagcatggtgctagataagcactgtctcattgaaccttcatgactgcccagtgcaaggttgatatacattaattaagctcctcatttggctgatctggcaactgaagttagaggcacttccctgcctgactccaggtatgtggcatcctatgtaaatgctcaccaccaatgtgccatcctatgtaagtgctcaccaccagtgtgccatcctattagttgtccatcaccaatgtgccatcctatgtaggtgctcatcaccaatgtgccatcctatgtaaatgctcaccaccaatgtgccaccctatgtaattgcccatcaccagtgtgccatcctatgtagttgtctatcaccaatgtgccatcctatgtaggtgctcatcaccaatgtgccatcctatgtaaatgctcaccaccaatgtgccaccctatgtaattgcccatcaccagtgtgccatcctatgtagttgtctatcaccaatgtgccatcctatgtaggtgctcatcaccaatgtgccatcctatgtaaatgctcaccaccaatgtgccatcctatgtaaatgcttacccattacctgcgtgccatcctacataagtgcttgctcatcacctgcatgccatcctatgtgagtgctcatcacctgtgtgccatcctatgtaagtgctcaccacccatatgccatcctatgtaagtgtggctcatcacctgtatgccaacctgtataagtgctcacaacccatgttccatcctacgtaagtgtggctcattacctgtgtgccatcctatgtaagtgtggctcattacctgtgtgccatcctatgtacgtgctcaccacccacatgtcatcctatatgagtgctcatcacccgcataacatcttatgtaagtcctcattacctgcatgccatcctacataagtaagtactcatcacccgcatgtcatcttatgtaactgctcatcacccaagtgacgtcctacataagtgcttactataggtcagggtgtatcagtgaagcactgaggagatagaaatgatcctgcaaagtgcctgggtcatagtccatgaagtgggcaaaggcctaacagaaagagggtcacacacagggcttacaggaccccacatcctatctcctccttgttcctatgctcagttttggaaccaccacccacaaactaccccaggattctagaatcacggggtgcagggtctccttctcccctcccctacactcagccacttgtccaggccaatcattctgatgcaaggtcaagctgcaggtgctaggcttaggagtgactgacagtctttattattgggtcctatcactgagcgtcggaaggcaaccagtaccagttttgttacaaggaaaggaacaagacggagaaaaggagctgggtgcagtggtgcatgactgcagtctcaggcactcaggtggctgaggcaagaggatcatttagtccaggagttcaagatgagcctgggcaacctggtgagaacctgtctcaaaaccaaagcaaaacaaaacaaagatcaagaaaagggcaggtcattgcaaatacagagtgaacttcttgggcatcttcacttaactggtgatatcacaggctctcatttcatcctctcaacagttctgggatgtgattggtgtccctatttcatagacaaggaatctgaagatcagaaagtgaagaaacttgcctaggatcacacagtgaggaagtgggcaagccagatgtcccattccagttcatttccatctagatctacagagcagggagaaggaagccattaatcaggcttgtaatagatgcttgtaaaagatgcttccaaaaagacttctaagaggaggggcttcttgggcttaggggtaaacagaatgggtttggaagtcaggctgcctgggtttgagtcctatctccacattcactagcttccagacctcagtttcctcttgtaaaaaaaaggtgataatagcaactacttcttggggattgttgtgaaaattaaataagcaaatgaagataaagcactagaataatgtttgaaacacagtagcccaggcactattctatcattgaaaagtaataatattattcccactatatgactattgaaggaagatcataatttgttgagcatctattctgtgccaggtaccatgactgagggtatttctattatcaccactccacattataatactacaaagtaagtgtggttattatccccagatagagaaaaccaaaacccaagaagaatatggtagccagcctccacggtgctcctctggtattcatgtcctgctgtgaccttctcccacatcaaatagggcggatccatgtaaccaataggatgtggtggaaacaagggtgcgtgacttctgaggctacatcatagaagacatggaagctcccatcactttcttagatggctaactttggggaggccagccgccatgtcatgaggacactcaagcagccctgtgtggaggctggcatggggagaaactgaggcctcttgtcaatggccagcaccaatttgccaagtaagtgagctgccaaggtagtagattctccaacttcagctgacgtgtttaccacagcctcatgcaagacctgtagccagaaccacccaggaaagccactcttaaattcctcaccatagaaactgagagattaaaaaaaaaaattaagcctctctctctcttccttcctctctctctccccccctccctctctctctctctctctccctctctctctctctccctctcttttcagtgatggggtcttgccctgttgcccaggctggagtgccatggggcaatcatagctgactgcatcctcaaactcctgggctcaagcgatcctcctacctgagcatcctaagtagtttttttgtttttaagtctctaagggttgggtaacgtgttacagagaaaatgacagtgaatacagaggatggacaatatgcatgagagtaagattgagatgcaggtgtgcctggctccaagtccatgcccataaaccctacatcatgaaaaagaaggagaaggatattcgggttgtgccatacgccttcctcccctagcccctttaaccagagtccagctggctggggaataatggcacacgaagacaccatgctgaaggctagagccagtccagacctggctcaagaggagaggtggggctgcccaggggctggaggcagctggctgtctgcctccctccttgttttgggaggccctgcggagaggaaggggtattcaccttgtttggaagctgcccactcaggccagtggccatggcaaccctcaccattcagagctactcctccaagcctggaactgcccagagtaccagctgccaccctcgtatgtacccaccacggcccagtctgccaccttcctccaggcagagcctcccacagctgctggagcctcccctaggagctccactggggagaagcagaggtcctctcctaccccttagccctggggtctggaattcaaccctcccccactctgttcccagttgccctctgtttgacaagaggagcttggaaaccacctcgatccagtcctcaaactccccttcccctgtgccgctctgaattccaggctatccccacgatatagccaaagcaccctggcttgctttgaaagtgtctggggagtttttgatcccctgaaaaaaaaaggcatttattatcagagactgtttgtaccatattttagtgtcctcaagagacaaagagaattctctctgcagttgagtaagcttcaaaatagaaaatcggagggtggggtaggtgacggccaaaaagcaatcatttatcaaccagcggggaagcagggaccgtaaacctctttggtggctgcaggtttcatcacagcctgacttatgcacctgactctggagaggaggtgagaatggggtgtgcagaagtcagtgggtcccgcagtcttccctccttcagcgttggtggccacagtctgtctgtggtcacttgcccccacagccccctgctctgccttccatttatcgagacctttcccttgcatttgcggagggggaagaagcagaggttaggttgctgacattctgcacaccccacaactccccagagaaatcctggggctgatcagtagaatccagccacctttcactggcagaaggcacagtgtttttctccctggaggtttttaacctgttacttcatgtaagcctcctattgtcaaatagagagaaactgaggggctttggaagcaaacagacttgggaaattcttggcaaattcttaactctatctctttgtgggtgacctgggatatgttcccggtgtcctcagcctctgagtgctcttggaagattaaatgggataaaccatgtggagtgaccagtgcgaggcccagcatgttctagaagctcaaaggaatggctaccacaagtcaaggtaaggatgctaccacttttcacagatgacacaactgaagctcagagagggtgagtaacaatcccaaggtcacagatatattgggtgcagagcccaaaccaggacctggggctccaggtctccaaccaccttgccgtttgtttctctcaatcagacagacattttcattcccatctgtaaaatggggatagggatagtacctatttgtaggatagctggaaggacagtgtgggaggtggtcaggcatgtggactctggtaccaagttcctgggttcaaatcccagttctccatctacgaactttgtgactttgtgtaagttatcgacatctgggtgcctcatctctcccatctgtaaactggagctaatatggatctagctcacaggcttgttggaggaataacttgggctaatagtcagtaaacatccctcaataatctaaaaccccgctgcctgtggttcccacacccagaggtctaggctaaccaaggctggggcaggtttctgggagatggtgaagctggctgcagaccatcctgaccccacagagggcttggtgggatgaggagaggcactgccctggcaggactgggactgggaaggaaggccaagaggactggaggcctctaccccatgccaccttcaggcagtactacccgagaattgttccctctctagctgagtggagtgtcgggcatgcgggccaagttcttgagtaacccagttttgagcaattctctaaaggagtgttaagccccagaggaatgcatgtcggctgtgttggtacagcttctgggtttgatctctgttttaaagacattcattaatcagcctccactctatttttagacaagtcatgcctagccatccaccagactctggcccctctctgagactggactttattttctgatgtaaaaaaaaaaaaaaaaaaaatgagagcgagaagtgaagcaattttcttaatgctcctttaaggagggggtaatacagaaatcacttctcagcacatcagcagtttgctaaatttacacaaaattagctgtcctgataaggctgtgttcattcctctatatttgggatgttttgcctgttttgtgactgtttctttaggagtcagcttcctctaccagactgagaataagcatagagtctgtttctcttgctgttgacatgatttcttcattagcgtcaccagcatccaacgcagtgtctggcaccaaggatttccatgaatatttgtcaggcgaatgcccatccttcctgtccccattccttctttctcttcagcaagacatacggcaccttgagggtggtctctgagggatagagattttgctggtccagctaattctctttcctctacttttcatacagaaatcccctttccactaggatttccactagggacccatttcatgtggttcagacaaggtgaaccttgttcacggggtcagacatgtgacccagacctggccacagttcccaatctccgtgaacacagttggttcagacacggacccacgagctaagaaaagctgatgagagcacccgcaggagagtgaggtacagcacagtttgggatctagatctgtgctgtctaatacagtagccactagccgtgtgtagctatttagatctaaatttgaattaactaaagctaaaaattaactaaaataaaataaaaaattcagctcctcaatcacattattcatatttcaagtgtttaatagccatgcatggctagtggttactgcactatacagcacagatataggagagttctattatgatagaaagttctgtcggacagcacagaaattgccgtttctgaacccaatcccaaaagatttcttgatcgatcgatcttccttccttccttcctccctccctccctccgtccctcccttcctcttctcttctctctccttctcctgccccttccccttcctcttcctcctctttttcctcttcttcttctttttatattaagtttgtttgagttgagtttctattatatagaacccaaatagtcttgaccaagatagataggactaattatagttcatcaagcactcacagatgctgaagttcatccagatgagatcatttaacacccacagagttattcagtttccagacaagcccttatcagtggatcacagaataccagtttatcttctcaactttgaccaggcaaatatctcaccctttattccagctattgatgattccagatagatgattgtttgatagatagatagatagatagatagatagatagatagatagagcatcactcactcacctggcacagtaatcttacacctttcttcacttaattgcctccattctgatctgatatccaagttgttcctatttgcacaatgaaaacctccggcctttgagaagcaaggatctgaggcttaattggacccccttaaatttgagggctacctcaaatttaaattaaggaacttgggtcagtaagaaagagaattctcacaaaaatcccagaacagctccaaactcaggctttccaaaggttaaatgagatgcagaaaatgacaggaagaccaggaatcaagacactgttctcttgcatcttctgtagcacctgattattaatgtgactctatccccactactaactgctagactctcaatttctataccttcagctcaaattttaaagaaagatactctgaggaacctaatttatttccccttacccctgctaagaaagttccagacaagagctccccataggctaccagccagccaatgaactggttgctcttgggtcaggtgctttcctctggtccaatcagctgaggtggaaggttacatgatatcaggacaatcacaggtctgatctctcgacaatcacaggtctgatctctcagcagagttggtagatggagcaatggttctaaatatacggtgttagaaaagtatcaatgggatcaaggttaaatgtacagactgtgaggccagactgggctcaaatgtagttcttctgttggttaactgtgaccttgggcgagttatttcaactcttatctctaaaatgggggtaataatacttatctcactagattggttagcagagagcctgttggcagcaagcacacatactctgttagctatgtttgtatttatttgttgaatttattattttttgcattatatgattagcctattctagataccgaggaagttgtccacagagggaaaaaattataccaagaagcaagagagcctgttttctgaccccctctcagtcacttggtaattattattcctcaatcttcacatctgaggatataactattttacctgactgaagacagaaggggtataccagatggtttcaccaagatccatcaaattctagtcaaagattcttccattttaattaagcccattgcttcctgtttgatcttctaagggcagagaataacaatgtaagctctgaccatttaaaaaaatcatcattcctgctctaatcatctcaaaccattcattcactggtcatcccgggaaggtcaacagcaatctccgaagagtctggtaccacgtcctcctcacaagtcactgctataagactgacacttatcaaaatgtctgcccatctccacagagacgctcctaatgtgccttgtttctgctttatgacaatgaccttggttacagccagttggtccaggaataggcacctgacccagtctgggccaatctggccccctctcttgggaatggtgaccaaaagagtctgtctcagcagaaactggaaatgtaacataaacagtcataagccaggggcctgctggcagtgccatgggggctaaagaacagaaaaggctagtctacaaagaaagaagagaatgaaattgatgtccaagaaaactggattcaagacaccagagagaaaatgagccaacccattcacacttccaggccctttctgaggcatgacaatgtggcagaatgtattttccaatattttccatcccatacgctcttccagaaccttgccactgcatcaaaagatggtgtctatatcccttccgcctgaaacggtgagcctttgtgactgctcacacttctaggatgtggcagaagtgacgctgtgtgattgctgaggctagatcataaaaggcaacacagcttgcacacagctctatctctttggacactcatccttggaatggcagccaccatgctctgaggaagcacaggtcacatggagcgccccacttggagacaaatggaggccccccagccctcagtgctggctgagcaaccagcagacagccagcaccaacctgccaccaggtgagtgtgccatcttgaaagcagatcctccagtcccagtgaaaccagcccaggtaacaccacatgaagcagaggtgagacttccccactgagctccatgtaaattgcagattcaggagcaatatatgattgtcacttaaaactgctaaatttgaggttggtttgtgaagcagcaataaatcactagaacaatgatgtctctgtcttcaatttacaaaagacagccctatatccttagagcaaagcccccattctggcttaagctagttcacttgggtttatttgacctacaactaaagaatgaaagctattgaaggcttcttttcccactttaaataggagtgagaggaggaaaaggaaattaaggctctctttctaatctgcagcccaccacatgcgttcaggtactcaggtaagggtccttagtcttttccacatgtatgtgtatatttgcatagctggaaccttaagcttttttactcccttaagcattagttatgaggttttgctcactgtggacacttaaccccaaagacgactgtcagccacagagtgttaacaaaaccaaaagactctttccattaagaacaatgatcctggccaggcacggtggctcacacctgtaatcccagcacattgggaggctgaggcaggcggatcacctgaggtcaggagtttgagaccagtctagccaacatgatgaaacccatctctactaaaaatacaataaattagccaggcgtggtggtgggtgcctgtaatcccagctattcgggaggctgaggtgggagaatcgcttgaacctgggaggcaaaggttgcagtgagctaagatcatgccattgcactccagcctgggcgacaagagtgagattccatctcaaaaaaaaaaaaaaagctgggcacggtggcttacgcctgtaatcctatcactttgggaggctaaggcaggtggattacctgaggtccggagtttaagaccagcctggccaatatggtgaaaccttgtctctactaaaaaatacaaaaattagccaggtgcattggcatgcgcctgtaatcctagctactctggaggctgaggcaggagaaacactggaacccgggagatggaggttgaggtgagccaagatcacaccactgcacttagcctgggctacagagcaagactccatctcaaaaaaaaaagaacagtgatccttcctggcacaggctgctctgcccagcccccgtcacataacatgtatcacatgacatagatcacataacatgcatcacataacgtacattacataactttgtcatataacatatcacataacacttaacgtagcactgcatcatagaacatacatcatgtaatgctgcatcatatacaacacataataccacataacaacatacacaccacataacactgcatcatataacatgcatgatataacaccacatcacataccttacatcatcatataacacatatcacataacactgcatcatattatatatcatataacactgcaacatataacatatcacataacatacatcacatcatataacactgcaaaatatacatcacataataccacatcacataccatacatcatcacattacatatattacatagcacagcatcatatatatcacataacactgcaacatataacataccgcataccatacatcacataacatatatcacataacatggtatcctataacatcacataactgcaacatatgtatcacataacgtataacacataacgtatgtcacatcacacataccacataacaccacatcaccagatgtacatacttcagtaattcattatcttgtgcagaagaaaaaacaaagatacaaagtctgggtgacctggatgttgccccctaaaagtcagagtctgagccactgccagggacacccaggactcctgagtacctttaggttgagccgagccttcagccaaagggactaaggatccaccatcaggaaagaggtaagaaggaactggaaacagttgtggcccatcaagaagtttcagccagtcaggatggatccaccatcaggaaagaggtaagaaggaactggaaacagttgtggcccatcaagaagtttcagccagtcaggatgtatccaccacacatggttaccacaaaccccatcataacaaaaactctatgtcatataaagatttccaagccctggcaagaaccaatatactgagttccagggaaatcaatacatttcaacagagtcttggtatatatggcaatgagatttgacccagtgtcatctccagggttgaagaaatgttggaaatgagttccagggaaatcaatacattgcaacagccttggcatatatggcaatgagactcgacccagtatcctctccaaggctgaagaaatggcagagcaaaaagccattgctataccactctcctgacctggccatggagtaaggactaaaatgaaggccaatattaatatgccgccttgatatctggtgagactgggaagatgttgcatggcctaaccacaagttcctctccccactcctatgggaaagatcccccagccagacaaccctccttggcaaagggaccaggtgcagttcctgcttatccttgagtagtgggtttcatttctctgccaactatggacttattcaaacaaaccaatcacatcccctcatggaaacaaggggacacctcaccctcttgatactacaaaacctgacgcccacagccctgtttgttacttctgtacctgcctcagcataacccctgcactcagctgctgttgggatcatctgcccagggtcaggtgctatgtatttggccattgcagtaaccttagtgtgggagtccccttctcacccattggttgaataggaggcaattaaaccactggcctttcaaaaaggttctggtgcttcccatccagcagccttggtggtattgagcatcaggattcattggctctgcagtccattcattcaacaacagttattgcgtaggttttggtgccaggcactgtcctccagggccatatgcccagttgctgagaccttgtccttgacctgttgtggacattagtcagcaacatttactgacaacacacacccacccaattcccaatcattgggaagcaattggcctaacaaaacagtcctccgctgtgggatgtgtatggcatggggctgcagtaaggtccttggtgccatatttaagcttctacatgttctaatcctggttctttcttcccctctagaaggctggaaacttttcaaagaagaagagggtgagtttctctgaccatattagccatgagcagccacagtgaaagaattaatgaattagttgcctttgcttatctttgccctggacttcagacctccttcaggagcaatggagggatccaaaagccaacactggaagatgtggatggtgcttccagctcaaggacgtggcctccagcaagtccctgaacatctttaagccctcacctgtcaaacagggttggtgattactttttttttttttttttgagatggagtctcactctgcctcctaggctggagtgtggtggtgtgatccaggctcactgcaacctccacctcccaggttcaagcaattctcctgcttcagcaccacccccaccacccccacccaccccaccaagcagctgggattacaggcatgtgctaccacgcctggctaacttttatatttttttaagtagaaacgggtttttgccatgttggccaggctggtcttgaactcctgacctcaagcaatccacccaccttggcctcccaaagtgctgggattataggcatgagccaccacgcctagccaatgatcacattttcctacctaactccctgggctgctgggatagcagatgagaatgggtgagaggttctttggaaagtgaaggtggtgctgtccagcagctatgtcagactgctatggtctgagtgtttgtgtcccactaccctgagacagatatgttgaaatcccaagccgcaatgtgatggtattcacctttgggaagtgattaggtcatgagggctctgcttcatggggttagtgcccttatgaaagaggcccaagcgggccgggcgcggtggctcatgcctataattgcagcactttgggaggccaaggcgggcggatcacctgaggtcagaagtttgagaccagcctaaccgacatggagaaacaacgtctctactaaaaatacaaaattagccgggcgtggtggcgcatgcctgtaatcctagctactcgggaggctgaggcaggagaatcacttgaacccaggtggcacaggttgcggcgagccgagattccaccattgcactccagccagggcaacaagagtgaaactctgtctcaaaaagaaagaaaaagaaaaagaaagaggcccaagagagctcattcactcctttcatcacatgaggacacagcaaaatgatggctgtctatgaaccaggaagcaggtcctcaccagacaccggatctgctgatgtcttgacattgggcttcccagcctccagcactgtgagaaataaatgtctgatgtttagaagccacccagtttatggtattttgttatagtggcccgaatggtctaagacaggcacccagtagaaggcagcccctgtgtgtgggtaggttccacacaaaggcaagcctagccccaaggtcgccaccaacaaaccccagagccatttttccatggggtctgaaaactgcaccattagatgctgcttagtttaggactttatattgggttgaattgtggccccaaaaaaggatgtctgagtcctaacccctggtccctgtgaatgtcaccttatttggagagtctttgaagttgctattaaggatctgaagatgagatcatcttggattaaccaggtaaccctaaatccaatgatgagtgtttttgttttgttttgttttggttttggttttggttttggttttttgagacacagtcttgctctgttgcccaggctggagtgcagtggtatgatctcagctcactgcaacctctgtctttcaggttcaagtgattctcctgcctcagcctcccaaataactgggattacaggtatgtgacaccacacccagctaatttttgtattcttagtagagacggagcttcaccatgttggccaggctggtcttgaactactgacctcatgatctgcccacctcggcctcccaaagtgctgggattacaggtgtgagccaccgcacccggcctataaatgcattttataagttcaaattgacatttactagttatcgaagctattcattgagaatagttagtgatacagttcggctgtgtccccacccaaatctcaccttgaattgtaacaatccccacatgtcaaggactaggccaggtggagataactgaatcgtgggagcagattttctgtgcgattctcatgatagtgaataggtcttattagatctgatgggtttctaaagggaagttcccctgcacatgctctcttgcctgctgccatgtaagacacgcctttgcttctcctttgtcttctgccatgattatgaggtctccccagccatgtggaactgtgagtccattaaacctctcgcctttataaatcacccaggctcagatatgttttttttagcagcatgagaacagactaatacagtttggctattcaaataaatgcaaaaatctggaatatggattatagatacagtgaacatattgcccaacctgggcgatattaattaaatgggatgacaggaactgtccccggatgaccaggatcaaatgaccctacttatgcatgacctttgtcttccatcagaccccagggcccgttaaactcaagtcaaatattttctagtttcccaggcacctctgtggaatccagtttgaaaaacagcatcttaagctactcttggcctgccgaggagatgttatcacatcacccaacacccccagcagatgtgaagattagaaccctgggccaggaatgtctgaggagggaggctgggggtaggtgagatggcagaggaaggaatgggaagaacaggaaaagaggaagaatctgaaaggtctgctggggataggttttggagttcagggtaagaaagaagaaagacttcacccaagagagatgtggagaggacaccacctcccaaatctgtgctgttcatgagggtacctgacagtaaccttgttgatcccccagggcaagcaaacatctgagtctcagtgagtctggagggagagcaagctggtgaggttctgcacatcaggtgtgttttaggaattatttgccaggctttgagagaatgttcttcaggcttatcaactgtgttcagcttccatggtgtattaaacaaactgggtggtttaaaacaacaaaaagagttgctctttcacagttctggaggctagaagtctgaagtcaaggtgttggcaggaccacacttcctctgaaggctccaaggaagagtgctccttgtctcttccagattctgggggctccaggctgtccttggcgttcctcggtttgtagctcatcaccccagtctctgcctctgccttcacatggccttcgcccatctgtgtgtctctgcgtgcactcctattcttataatataaagactacagtcattagatttaagggcccaccctaatccagtatgaccttatcctaactaattacatctgcaaagaccctatttccaaataaagtcacattcagaggttctagatggacatgaactttggtggggggtggacactattaaactcactatgcattgcattcattggtattatagatcaataacttattggtttatccagtactgactccagctaaggagaaggcaagctttctataagcagaatctgctgcttctagttcccccagaatattctctcttcaatccatcttctgaactctccatcttccttctttagaggtcccccttctcctacattccctgtgttccaaatagagcaaccacatgttcaggaactactcacgctaaaaacttgcaggtcagtctcaatagctcatgctcactcacttccgccaccaccgatcctaaaactcacacaaatccctgtgtgattattcccatttctgttattcccctcctctctcattcctgctttatgtctttattgccgttcacctggactgccatgaaaacgccgtgtccccgtccactctgcacttcattgatctcaaatgcaagactagtcacacactccacaagcccctttaggaatcacttgaaataaacccgcctctccctctccctctccctctccctctccctctccctctccacctccctctccctctccctctccctctccccacggtctccctatccctcttttttccacggtctccctctccctctcttcacggtctccctctgatgccgagccgaagctggactgtgctgctgccatctcggctcactgcaacctccctgcctgattctcctgcctcagcctgccgagtgcctgcgattgcaggcgcgcgctgccacacctgactggttttcgtattttttttggtggagacggggtttcgctgtgttggccgggctggtctccagctcctaatcacgagtgatccgccagcttcggcctcccaaggtgccgggattgcagatggagtctcgttcactcagtgctcaacggtgcccaggctggagtgcagtggcatgatctcagctcgctacaacctacacctcccagccgcctgccttggcctcccgaagtgccgagattgcagcctctgcccggccgccaccccatctgggaagtgaggagcgtctctacctggccgcccatcgtctgggatgtgaggagcccctctgcctggctgcccagtctggaaagtgaggagcgtctctgccctgccgccatcccatctaggaagtgaggagcgtctctgcccggccgcccatcgtctgagatgtggggagcgcctctgccctgccgccccgtctgggatgtgaggagcgtctctgcccggccgccccgtctgagaagtgaggagcccctccgcctggcagctgccccgtctgagaagtgaggagcccctccgcccggcagccaccccgtctgggaagtgaggagcatctccacctggcagccgccccgtccgggagggaggtggggggctcagccccctgcccggccagccgcccggtccgggaggtgaggggcacctctgcccggccgcccctactgggaagtgaggagcccctctgcccggccaccaccccgtctggggggtgtacccaacagctcattgagaaggggccaagatgacaatggcggttttgtgggatagaaaagggggaaaggtggggaaaagattgggaaatcggatggttgctgtgtctgtgtagaaagaagtagacatgggagacctttcattttgttctgtactaagaaaaattcttctgccttgggatcctgttgatctatgaccttacccccaacgctgtgctctctgaaacatgtgctgtgtccactcagggttaaatggattaagggcagtgcaagatgtgctttgttaaacagatgcttgaaggcagcatgctcgttaagagtcatcaccactccctaatctcaagtacccagggacacaaacactgcggaaggccgcagggtcctctgcctaggaaaaccagagacctttgttcacttgtttatctgctgaccttccctccactattgtcctatgaccctgccaaatccccctctgcgagaaacacccaagaatgatcaataaaaaaaaataaaataaaaaaataaaaaaaattaaaaaaaaagaaagtaataaaccctctgcttcagaaaaatgtacataagcacctactgcacaccacactttgagtagcatgcataataatgcaaattagtacatgtataatcaagactccttccatcataataattgtactcattattatatcatcttatttaatccctccagcaaccctacaagactggcattatcatgccccctttatggattaaggaaacaacgacaacaaaacaggtttgggcagtgaaagtaaacggtccaaggtcataccactagtaagtagcagcagagccaagatttgtacccagatctacctgtgtctacatttttggctcttaaaccaatagtaatgccccacccctcttgtcatcaaagcagacaagatgtcccctccttggttacccatagcaaggacttctttcaagcactgttaacatttcaatcctaattccttgttcacatatttgtctttggtgtctttgagttcccagcatttgggcaatgcctggaacagagtaggtgcttaacaaatgtttgagtgacagagtttctcttgcgccttactgagctgggcccccatctatcaactcagtctgagattaattgtactttatttttaagtcagcaggagaccccttcagataagctacgtaagcctgaagtggcagccaggcacagtacttggtcactggccagggcgggaggctctctaacccaacaggtggcccccagcccagatcgtcagggagccccaccctccaggagaccgtggctgagtggcccatctggcccagcctgcgcctgagtgctgaagatctttgtgtctccaagctgagaactgggtccctgctccttgccaaccattcacaggggagaaatgattaaaacactggagagactgactcatggggaaatatgaaaaaaacacaatagtccccaaatatgtttagcttggccccatcacaaaggggggatgtgataagggctccaagctaaagggaggcaacataaaggcgggagaattgtgcagagcctgctgactgggagggacccaagggaaaatgaaaatgagatggaggggaataaaatggggcatcgagttggaggaaaaagagtttctggagctcaagggcatctttccataaagagatcagagttggggaccactgccagagattttaaacaacctcctccccactggccaggcattgcctcctactctgtgccaggcattgcccaagttctgggaactcaaagacaacgaagacaaatatgtgaacaaggaattaggattgaaatcttcggctgggcgtgatggctcatgcctgtaatcccagcactttgggaggccaaggcgggcagatcacctgaggtcaggagttcgagaccagcctggccaacatggtgaaaccccatctctactaaaaatacaaaaaattacccgggggtggcagtgggcgcctgtaatcccagctactccagaggctgaggcaagagaattgcttgaacccgggaggcggaggttgcagtgagctgagatcacaccactgcactccagcctgggccacaagagtaaaactccgcctaaaaaaaaaaaatagtttctggagctcaagggcatctttccatagcgaggtcagaatcggagaccactgccagagattttaaacaacctccttcacactagtggctcctggctttgacagcaggagactgaagtctcattcattccttcagcaaacacttccatgcccactgcaggccaagcacagtgccaggttcgaggttgctgagtgacgaaaacagtgtctctactctcagacagcttatattctaccaggaagaagcagcccctgagtcctctgccttagccatgccatctgcctagaacgttcttccaccaggtattcatatggccacctccctcaacttggtcaagttttattcagaaaacccctactccatggggccaaccctatttattatggaaactgtcttactctgttcaggctgctagaacaaaatgccttagactgggtagtttagaaaccacagagatgtattgctcacagttctgagggccgggaagaccaaagtcacggggccagcaggtgccacgtctggtgaggagcttgctttctgcttcaaagatggcaccttgcggctgtgcctcacgtggcggaaggggctggggagctccttccagcctctcttataagggcactgaattagtcagttttgcattgctataaagaaatacctgagactgaataatttataaagaaaagtttaattggcttacggttctgcaggctctacaggaagcatggccccagcatctgcctctggtgaggcctcagggaaggtgaggccagacccagtgcatcccatggtgagagagggggagggagagagagagagagaggtagacggggaggaggaggcggacagtgggagggggagagggaccgggagagggggaggagtagagggagaaagagagggagagggagagggagagagggagggagggagagggaaagagagagagggagagggagagtgagggagagggagggagggagacagggagagagagggagagggagggaggaagagagggagagagagagacggagggagggagagggagaaagagagagagggagggagaggaagagagagagagaggaagagagggagagacagagggaaggacagggagagagggagagagagagggagagggagagagagagggagggagggagagggagggagagggacagagaaagggagaaggagagggagagggagagagagggagggaaggagagggagaaggaaagagagagggagggaaggagagggaaagagagggagagggagagtggcaaggagagagagagggagggagggacaaagagagagagggagggagagagggagagggagagagagagggagggagagggaaagagagagagagagagaggaagagagagagggagagggagggaggcagagggagagagagaggtagagagagagggagagagacagggagagagagagggagagggagggaggaagagggagagggagagagaaagagaaggagagagagagggagggagggagagaaagggaaggagggagagggagagggaggcagagagagggggagggggagagagaaggagggggagggggagagagaaggagggggagggggagagagaggtagccccccccctacacagagggagggggagattctcagatacagattgggagggagagagagagggagggggagagggagagagagggagggagagggagagagagagggagagggggaaggagggagagggagagagaaagggagaaggagagggagagggagagagagggagggagggacagagggagggagagggaaagagagggagaaggagagtcagaaggagagagagagggagggagtgagaaagagagagagggagggagagagggagtgagagagggagggagaggaaatggaaagagagagagggagggagagagagagggagatggagggaggaagagggagtgggagagagagggagagagaaagagagggagagagaaggaaggagggagagagagggaaggagggagagagagggagggggagagacagaaagggatgggggagagagagggagagagaggaagagagggagcgagggagggaaggagggagggagagagagagggagaggaagagagaggaaggaggtgccacactcttttaaacaaccagatcttgtgtgaactcagagggggaactcactcattatcacaaggacagcaccaggccattcatgagagatccacccccatgacccgaacacctcccactaggcccaccaacattggaggtcccatttcaacatgagatttggagggaaaaaaacatccaaaccatatcaggcactgatcccattctggagggtggggatctcatgacttagtcacttcccaaaggccccacctcttcatactatcacattgggtattaggttccaacatatgaatttggggtgggggggacaccaatattcagaccacagcaatcaccttattactgaccaccttattcaatagggtcacccacacaaagccccaccatgcccgctgctccacttgttctgtgttctaggggatttcgcacccttcaacacactatgtaattgctcttattttgtttatcatctgtttcttcccaccttggaaaggcccacagggcctcaactgagggctgcggaagtgacctaaggaacagacacagttatcctgtctcagagctcgtcccctcctcattgtctctgttacctgtagccaggccatctgcagagctggcaagcaatgggacagacgtggagctgatgctggcattgtctctctggttttgagtctgaaccaaggctcctgtgtgagagtcaaaacacctcttcacatctcttgcctccttcctcaactcctttgggcctcttttcttccagctgtctgggagccaggctgagttccccacaaatgtaaagcaatcataaataatcatcaggctaatgaggctgggggtgatcatgcaggaactccctgccacatgacaaacagccggctgctgatttatcatgggacagatgtaaatactcgcctctcccctgagcaggaacacatgttcttagtcatatggtagctgctgaaaacaccccattggggttgttcaccctctgctgagatcagaaggaggcagagaggcccaagctttgccaggaatgaatggtggttaaaaggggagggttctttctcttagcccatcaacctggccaccaattaaaaaaactcaaataaccagtgggtctagcataggagtgaagagtgagttttaggcccaaaagctcaggatgcttaaactccaactgccacccagtagggtgggacctccattaagttgcttaacaatgctgagcctcagttttctcctctgaaaatgggttaataatagtatcttccccattgggttgttgtgaacatcaagaatgaatgtcaactgtttaacacagagtaagaccttaataaacggatggctgggcatggtggcccacacctgtaatcccagcactctgggaggctgaggcaggtggatcacctgaggtcaggagttcaagaccagcctggccaacatggtgaaaccccatctctactaaaaatacaaaaattagccgggcatggtggtgcacacctgtaatcccagctactcaggatgctgaggcaggagaattgctccaacccaggaggcagaggttgcagtgagccaagatcatgccactgcactccagcctgggcaatagagtgagactctgtcttaaataaataaataaataaataaataaataaataaataaagcacagttagtgtcagcatgctccattgttagtcaacatgattcttgctcttatcctggaagaccccttgctctcccatgggcacctgattatgctcactccatcccatctttgtcctcacccagagcccctctcctcttctctcttcctgtccaaattctaaccatccctcccaactgctgccccattttttccagccattcccgatttctccttgccttgatcttgtactggaaatagtaagtgtcttttaaacatttttttaagccacagatccctttcttacaaggaaattgcacacagaaataaacacaaataagaccaataaaggcagagctgtgaaggcaaggaaaagtgagaactagagtctctaccatccatggacttaccttagggttaggaagatgagccccgccccctatggacgtagagtgaatgagatcattggatcatggtgtcaccatgttctgccttggactttgagtcaggcagctgccatcttcagcccatggtgcacagtcctgccccttcaccctgcttcattcctttgtccacctttctctctcctccaataagcttctggggcaagaaccatgcctccttcgtgtcttcctactcacatcccaaaactaggacagggctctgtacccccgcaggcacccaacatacatctgttaacatgaaatgagatacatccagacagtttataaatacactaagcaaagcctctcctcattatagatgggggtaaactgaggcagggccacccaggtatttatcaagagagtcagccctggaataggagcccccagacgcctagctccagcctcacccactagccttggaggctcccaaatgtaagtgacttgctgttcatattccctggcatccagcaacccaagaattttgctcttgctatcaggaggatggaaagataggagcttagggtgagtaagacaaaagctctctgagaaagaactgttgctgtctgggcaagagagacagggaagagaacccaagaagtttaaggcaagaatgatacacgtatcttgttaaatgctaagttctactgtccgggccaggggttttgaagccacaaggacttcccagaggcagatggaggtaggagggaagccaggagtgtgtacaacggaaaaggccccagtggggagggtcccagacagcctcctcccctaccctagatttcatctgagcaggtctgcctttatcagtcttacttgtgtttatttctgggtacgatttccttgtaacaaagggatctgtggcttaaaaaatgtttaaaagacacttgctatttccagtacaagatcaaggtgaggagaaatcaagaatggctgcaaaagatggggcaggcgttgggagggatggttagaatttggagaggaagaggagaggggctctgggtgaggacaaagatgggatggagtgagcatgaccaggtgcccacaggacagcaaggggtcttccaggataagagcaagaatcatgttgactaacaatggagaatggagagggttgggtgtgagagggggtggggtgagggaaagtgtaagggtggaccttcactctattctcccgcaaatgccttccttagacaatggctcctgatgggccttgtagatccaaccaacaaagccccattcccttccccatcacacatccctagttgcctctgagccactgccagcctatcaactataggaggatgcctttctcatgaccctttgtcatgaggttgccagagtcacccccctcaactaccttgcgtgatcacctgtcagctgtgtgaaacttgatcaggtggcttaacctctctgaacctcaggtcctcatgtaccaaatggggtgacagtgttgtgagaattatacatgagataatttatgatcgcacataccaaggtgcctggcccttgaggaattctcaataattacaaggtagttggctctagaagactttgggaaaccaagctcgggttgtggttcattatgggttaccatggaaaccagacctaaaggctggagaacagacaggcctagtgtgcccagagcacctaggcctgattcacattaggatctattttcttgaatccttaaatgcaccttagagttcacgcaggcatgaaggaatggctccaggcattgtcctcagcccctgagcaagggagtaagcccagttccacacaggggcaattcctgaacacacattcactgcgtgaagaaagggctgaggacctagctctgggccgcatgtagacaggagtgattgatgagtttaacttcatgcatctcattgcagcctaaaaggatgtgacaagtccgggcgcagtgtctcacgcctttaatcccagcactttgggaggccaaagcgggtggatcacttgaggtcaggagttcaagactagcctggccaacatggcgaaaccccatttctactaataatacaaaaaaattagctgggcgtggtggcacacacctgtaatctcagctactcgggaggctgagcaggagaatcgctggaacccgggaggcagaggttgcagtgagctgagatcacaccattgcactccagcctgggcaacgagagcaaaactccatctcaaaaaaaaaaaaagatatgacaaaaagtcaggtgaacttgctggtttcattctatccaagttggtgcctctcagaggttccttgtttagttgacttgtgctggggttaatggaagatatgcatcactaacaggtgcttttcactggatactttgatactcatcaccagccagcagattccaaggttgaaccactgcttgtatgtctgttcttaagtgttgaactgatggctgctctctccctggtaatagggtatctgccccattgatagctatcagtgggaggcactcagatggaacccgcataactaccacttctagctctatgaacttggcactggtcacttaatcctctgagcttcagtttcccgctctgaaaaataggtatggcgctgacacaagctactctgcctgccactggtttgctggaataaaatcaaaggtatagaaatggaccttgggaggtcaaggcaggtggatcacctgaggtcaagaattcaagaccaggctggccaacatggtgaaaccccatctctactaaaaatacaaaaattagctgggcatggtagcacaaacctgtagtcccagctactcaggaggctgtggcaggaaggtcacttgaacctgggaggaagagcctgttccccaatcccttccatttctatactttttttttttttgagccagagtctcgctctgtcgccactgcactccagcctgggcaacagagcaagactctggctcgcaaaaaaaagtatagaaatggaagggcttggagaacaggctctgtctcaagccctcattaccagttggtcagctgatcccacacaacttattgtgaaaacacagtaagtgtgttcctgagaattaagggggtgtggggaagaatgcatctttctgatattctaaaagccactctctagagagagtagttataaatgcaacacagaggccttaatacaactgtaatatacttgacctgtttgtcacatggtgctggcaaattgcttaatgtctcaagaccttagtttccccatgtgcaaaataaagggacttgggtggatggtttgctccttggctccaaccttctgtgactattgataggcattagattttgagagatatgaaccataatgtctaccatcccaacacagtctgtttgagcacaactgaattatctcagcaagcacatgcttgactttggataggtttcatctcatacttcctcacaacaaattatcttgccagtgagaaaagagaggctcagggaagttcaacttctaaggccacatagctaataaatgactgggccaggacttgaacctggacctgcttgtcccaggacctgcttgtcccaacacctatgtatcttccaagacacagtgcttttgccaagggacagaggttttccagatttgcaatgagatatttttatgttgtttggtagggaaaccagatatatataataatatatataaaattacatatacatttataattatacataaaattacatatacatatataattatatataaaattacatataatacgtttataattatatgttatatatatgacatatagtatataatatatatttttctatgttatattttatatgttatatatgtatttttgaaaccctttagaaggtcaagactcttcagaaggtcaaggtcatttcacgggtgaatggttaatccccccaagcaacaacaccgtgtgtataaactgcccccagaatgcagccctttcaagatggagaaggaggggcctcagggagggcagaacgcccagcgcacctgccaggtctgtgaaagaggagaggttgaagaagaaagagtaggaaaaagctttctttccccctcaagttagaaagcgggcagagcaagagagagagatcaaaaaccactaaaggtccctcatgtcaacctctccctgttttaattaagcagagtccacacccccacccccactccctcaaaaatgctttgcactcagcaagagctgcttcacagcaggttgcagttaagccttcaaacaaccagcagcctcaggaaatgccagcagcccacaggtgcggggcgaggcggggcccctccccttctccgcacccaggccgagcagccacaagatggaccaaggagccgcaagagcattccctgaacccttctccactgggccgtgattctcggcagcgagcctccaactgcggcaaccctcggtaagacaggcatcttccgtggggacccagccaacacctacagacatccatacatatcaagctcaaaaaaaactcacaaaacaactcttgccgctgttatgtgcgatgcattcacattttctactctttttttttttttttttttaatgctgattgcagccttttatattagcgtcacgattcactgaaggtttccaaactcattttgaaaacgcagtctgctggatggaggcattaatgtcctccaagtcaggcagagcctgacctactctccttccttgcctcattagctctacccagcccaggtccccgctccagcaaacttgcagctctggaatgtctttagcaactccgcacctccaggcctgggccatacaccttgctaagcctgatgcccattctcctgcccccctgttcttcctacagttgtgaccacctacctctatgtctctgaatttctttttttttttaattttattttttacttcttcccttttttgtttgtttgtttgtttgtttctgctggggttttttgtttgttttgttttagacagagtctcccgctgtcgcccaggctggagtgcagtggcgcgatcttggctcactgcaacctccacctcccaggttcaagcaattctcctgcctcagcctcccgagtagctgggattacagacacatgccaccacacctggctaatttttgtatttttagagacaggttttcaccatactggccaagttggtctcgaactcctgacctcaagtgatccgcctgccttggcctcccaaagtgctgggattacaggcgtgagccaccacgccctgcctcctccctgaatttctcatgtgtaactgttgcagattgcaagcgcctctgttccccactgatcaccctaggtgtggctgttctatggagaccaggttatgagtcctccagggcctgtttatcctgtggctggagtcctactaatcaaagtttttccatcaacatttctaaatggaagagagaaggcaaaaagtggggtgggggtgggaggggcgcaggaggagggaggactgggccctcccccagagacaaaccccattcctaaggaaggaaaattgcaattattgtcaactttctgtgggggaccttccatgcttagcaggaagaggacaatggttttcagacccaacattgatggcaacacctgccttccaggcgggaggcaggattcctctcagaggtgagttgctgagagatgccttgagggaccttctcagaagagaaaagcaaggctcgctggaccttccagaaaggcaggaatgagggggaggcaatggttagcagccagccactgggaaaacaccgtgcagggtgggcccctggggagcgggggggagctccagcgatgttgaggagggcatggcgggtgcattgggggcttcgtctattccatcaagcccacccagaaaggcagggcaggctccgtgtcccactggccaggttcagtcctgggaccctagactagttaccaaaccctgctgtgtttctgcttcctggccgtcacatggggacctgcctcttagggttctgtgaggacccaacgggttaagacaaataacacacttagagcatggccagatacaggaaaagtgttctattcattttatttcatcaacacattaactcatggaggtaattttttttttttttttttttcccgagacggagtctcactctatcatccaggctggagtgcagtagtgcaatctcggctcactgcaacctttgccttacaggttcgagctattctcctgcctcagcctcctgagtagctgggactacaggcgtgtgccactgcgcccaattaatttttgtatttttggtagagatggggttccactatgttggccaggctggtcttgaactcctgacctcaagtgatccacccccctcagcctcccaaagtgctgggattacaggcgtgagccagtgtacctggcccaaggtgaatattatccccattttgtagatgaggaaactgaggctcagagggccccaggagaagtggcctcacagaatccactacacaaagaatgtttatttagcaactgtcacgggaaaggcaggaaattcagaggaggctaataggccattctgtcccagagaggtttatgtttctagtggggtggtgattgcaaaccccagtaaagtttttctgctttcaaagggcagagagatcccaggggaaggaaagtgggagaggaaggggatttgggctggttagaggaagctttgctagaggaactaagctccaggataatcagggtttgtgatggggtggggagagaaaaccatcaactcagaggcagaagaggttttcatagtatttgtatcctctctcctcaggctctgcattggctggtcctgattacagaaaaaaaaaaaatgatctgcttcagagtgggtcaagagacccacggattaaaagcctcaaatgtatgagtacatatgggcaccaagaagggaacaggcaccgaggcctattgagggtagagaatggaaggaaagtgaggaatgaaaaacaactatgtttattacctgggtggcaaaataatctgcacaccaaacccctgtgacatgcagtttacctgcacctgtcccagtacccttgaacctaaagtaaaaattaaaaataaaaaagaaagttgaaatgactaataacaaaaaaaaatttttttagagatgggggtcttgctattttgctcaggctgatcttaaactcctggctcaagcgatccttcccccttggcctcccaaagtgctgggattatttttaatgacgtttgttcatactttgtttgtaatacttatggagattctcacccaccgttaccagttagctttcccaaactgtgctttaactgttgattttgtaataaaaagcagtatcttcaaataaataaataaaatgaacacattgaaaacacaaacaaaaaaggcctcggtgtaggtttccagtctctgagtgaggctgtatacactcagccagggaggaaaggatccatgatcattgttagaggtaaacatggaaaagatagcacagtgacaagccagtggtcctcaacttcggtggcatattagaataccctgggaagtcccactccatcccaattaagtccgaatctctgaaggtggggctgaggcatcagtaggttttaaagctcctgggggctgttgtgcaaaggaaaacttgaagctctgttccttcatttcaaaaagaaagaaagaaaatggaagtggccagagcctctctccaggcgaggaacagaaagcagaaaagaactggcttctttttgtgatcttggtccaaacctctttttcctctcactgaaggattctcccagcaacctccaagcaaccagtcaagagacgctgccctgaatttttggtcctcagctatagaacaaagaagtctttgaggtttaacaagaggctgctcagctctctggcccctgggctactaagatctagattgggagcctggactgccacatgtgtaagggacggagcctcggatcagggctgccagctggtgccctccaaaggcagtatctcacctcctgcccaccctcctcccaaccctcaggagggtgcttgcagtgagatgagatgccgcagggaataaaaaccaccagcaccccctcagcgtccctccactgtgtcaggatcacagacagtgagccccagcccccagcccagccctctctcccctggagggaaaccagcttaaatttgactggttagtaggaatccctcatctggtcagtgccaagatatccccagcctcctgctccctaacccggctcctccgggagtgctcttccaagcaggtggaaacatagcttgcctgaagtggtgatgaatctcctcatagtaggggttgggaggataggtggcacttggactagaattgggaatatgggagtgggaagggcagtggaagggggattttgttccattttttttttttttttttttttttttttgctttctccagtctcagaggtaggagatgttgggcagcagtcaagaaaaagttcacctctccaagctttaccataggcaactggccaccacccctcctcactccagcggtttgaatggtttgctcctaactgtgccctctgcatttgccttcatccatctccattcttctttacggtcaacatgccaggaccctacatcttctcccacatcagttgttcacaggggctccttcccatggagttctgtctaatggcttcccaaacctgagtctcatggacatgtccactcttcttgtccaatatctcaggagccttgaatactgctgaccactatggttgtagggtggtggtagggtggtggtaggatggtgtagggtggtggtaaggtggttgtagggtggtgtacagtggtggtcaggtggtggtaagatggtatagggtggtgtagagtggtagggtggtggaaggatagtgtgatagggtggtggaagggtggttgtagggtgatgtagggtggtggtagggtggtggaagggtggttgtagggtggtatgggggtggtagggtagttttagagtggtagggtggtgttatggtggtggtatggtggtgtagggtggtggtactgtggtgtagggtggttgtagggtggtagggtggtggtaaggtagttttagggtggcagggtggtggtacagtggtggtagagtggtggtaaggtggtgtagggtgacggtagggtggtgtagggtggtggaaagatagtggtaggggggtgtagggtggtggtagggtgaaaataaagctacatgtatatattgaggtctggcacacagtgtttaaaacatgttagctctctcttccctgcgtactctcaagagtgtatgtatggtgttgagtgtaccctgggccctggctctgggtcattcagcaatgactgaggagggctggaaacaaggaggtgcctgtggagaacaaatccacttctggttactggtttgagacctggtaacagtggccatccccgaccttcttgggctgccatctttgaagaccaccatccctaaggtgaacagagatggttcagagatttttcctttatctttccatagaggaagtacaaccagaagttgggatgagtcggccttgagatggaagagatttgagataccccacttttcccagtgactgctttgataagcagacagtcttcctttctctttcctttgaagattttggtccaatttgcaaaggagctagtatcccagttgttttaagaatgtatagtcctggaggcagacaccaactgagaaaatggagcacctagaaaaaggcagataagggaataaaagaaatggctaaattcataatttttttaaaattatgagaaacagaagaaaatagttatgagcttaagtagggaagcacttctaagcacacacatattaagaacatataatggaaagagtgatagatttgaatacatttaaaaaatgtatttctctatgttaaaaaaacttttttttttttttttttgtgatggagtcttgctctgtcacccaggctggagtgcagtggcgcaatcttggctgactgcaacctccacttcctgagttctggcaattctcttgcctcagcctccctagtagctgggattacaggcgcccaccaccacacctggctaattttcctatctttagtagagacagggtttcactatgttggccaggctggtgattcacctgccttggcctcccaaagtggtggcaggcatgagccacagtgcccagctgaaaaacaatttctatagattaaaaagaaactatatataattttataggttaaaaaacaaagtatttgaaatatatataacaaaattaatatctttaatatataaacagcttttacaaattaataaaaaaggaaaatcccagctaaaaagttcaatgcacgtaaatatgcaatttacaaataaagacatacagatataaaaagtatatcctttgagtaataaaataaatacaaactaaaataacagtaaaattccttttttttcccacttagcttattgtcaatgattaaaaataaatgcttaatgttggtaagattacgggaaacagaaactctgattcaaacctactgaaaacataaagctatgtaacatttctgggggcagtttgccagtatgaattaaaacttttatatgatttactcacgttcactcttaggaatgtctcttaagaaaataactagaagtggctgggcgcggtggctcactcctgtaatcccagcactttgggaggccgaggcaggcggatcacgaggtcaggagatcgggaccatcctggccaacatggtgaaaccccatgtctactaaaaatgcaaaaattagccaggcatggtggcacgtggctgtaatcccagctactcaggaggcggaggcaggagaatcccctgaaccaggcagttggaggtggcagtgagccgagattgcgccatagcactctagcctggcgacagagcgagactccatctcaaaaaaaaataactagaagtgtatacaaagaattgcatataaagatgttagtcaaagcgttcttcataataatttttaaattaagaacaacctaggccgggcgtggtggctcacacctgtaatcccagcactttgggaggccgaggtgggtggatcacaaggtcaggagttcgagaccagcctgaccaacatggtgaaactctgtctctactaaaattacaaaaatcagctgggcgtggtggtgtgcgcctataatcccagctactcaggaggctgaggcaggagaatcgcttgaacccgggagacagaggttccagtgagccaagatcacatcactgcactccagcctgggtgacagagcaagactccgtctcaaaaaaaaaaaaaaaaaaaaaaacaacctaaatgctgaggcaggataatcgcttgaacctgggaggcagagatggcagtgagccaagatggtgccactgcactccagcctgggtgacagagcaagactctgtctcaaaaaaaaaaaaaaaaaaaaggaaagaaaaaaaagaacagcctaaatgtctgcaaatagggacttggtttaatatagtttggcataaatagatagaatgctgtacagcaataaaaatcataatttcaccaggtgcagtggctcacacctgtaatcccaacagtttgggaggccgaggcgggtggattactaagttaggagttcaagaccagcctggccaatatggtgaaaccccgtctctactaaaaaatagaaaaaatagctgggcacggtggcgggtgcctgtaatcccagctacgcgggaggctgaggcaggagaatagcttgaacctgggaggcagaggttgcagtgagccaagatcatgccactgcactccagactggatgacagagtgagactccgtctcaaaaaaaaaaaaatatatatatatatatatatatgtatatatataaaatttcaaagaatatgaatacacagaaatattcacaatataatattgtggaaggaagctgggaaacaaaggaaatgtggtttataaaaaacaggctgaaggaaatggccaagagaagagagtccttgagtgctctgcgtagatcttttgtccagtcctttggcaggaaaggtagggctctatgattgacagctcatcagagtcacctggagtccggcaaggaggtttccccaggaagggagcacaggatagacaaatatataggtcatctgtgcaattgagaaagttgattgtggtggtggcggcggtggtagtgatggagcttgggggcagggggagattgagaaggtggcatctgcaatactggaattctcaatgacagtcgaagcatgtgctttacagtcacctacaaagcagggtcctaaaaagtaattttgctatatttcccaaaagctttgaaataggaagaaatccaaaactgctcatttccttatatttattttgttgtttagcattctatttgtttgcagcagagtctcagtctgacctccgagcccacccagagggcccgggcgactgcaggagggccactgctcctgcccgcggagctggagtggggcccagagacagagactggggtgtccaccaggagactcccaaggctcccagaccggagctccgtacaaaccctggagggcaaagcggggagagggagccaagatgaagagcccaggagcctggagagcaggaaccctttgtctgaggaagctccaaggaaacggaggggactccctgaagtagattccttcatgtcttcagggtggctttttatgctaagccccacctgggatgctggtgtgctgaagcatttagggagctggcccagcagagaggatgcagggaaagcctggggatggaggccaggagaaccacagaccccaccatctgagagcctgaaaccaacaacaaacttgtggccaaagcacagtgggtactgggttttgtaccaggagtttctggctgtataacaacccacgcttgtgggaaataatccatcccctcaagaactaatccagtctcgccagagcaagatctcactcacgaccaggagaacagcaccaagccagtcatgagagacccacccccatgacccaagcacctcctgccaggcccacctccaacaccaccacattggagatcaaatttcaacaagagttttggcggggacaaacaaaccctatccaaaccatagcacatgccatcgttgaatgccagaaactgaaagcctaagcgtggccctatacagtctaggcccctgctctgccagggaccagattcagccgcatggcaacgtccccagctggttcatgagcacatttgagaagcactgaggatcgtgttaaactgcaggtcttgatgcagtatgtacgggggagggactgagattgtgttgctaaatagatcctagatgaccctgatgttgctggtccatggatcacactttgggggaaaaagggggtctactgtatctgttctatgccccaccccccattttgatgaaagctgcccgcatccctctcacttgcaccactacctggctccaccctctaagtggagcccctccctctctccaggctcacagcttctccactgcctccctcacccactttcactgacaggttctcaaaaggctcatgacagtcaggcgcggtggttcacacctgtaatcctagcactttgggaggctgaggcaggctgattacttgagccctggagtttgagaccagcctgggcaacatagcaagaccccatctctgcaaaaaaaaaatacgaaaattagtcaggcatggtggcacatgcctgtagtcccagctactagggaggctgaggtgggaggatcgtctgagcccaggaggtcgaggctgcaatgagccgtgattgcaccactgcactccagcctagttgtcagagatcccgtctcaaaaaagaaaaagaaaaaaggctcatgacattatctgcttcattttcctcaccatttccctcctacaaaagcctagcaattagcctttgtctcagacctctctctctgtctctctcctctctctctgtttgtgtgtgtgtgtgtgtgtgtgtgtgtgtgtctctctctccctgctgaacagattttcaaaagtcaccaacaacctcttaaaaatcctgcttattgccgggtgtggtggtgcacacctgtaatcccaacaatttgagaggctgaggcgagtggatcacctgaggtcaggagttcacgaccagcctgactaacatggtgaaacccagtctctactaaaaaaaaaaaaaaaaaaaaaaaaaaataggtgtggtggtgtatgcctgtaatccaagctacttgagaggctgagacaggaggatcgcttgtacctgggaggcagaggttgcggtgagccgagatcatgccagtgcactccagcctgggcaataagagcaaaactctatctcaaaaaaaaaaaaaaattcctgcttattggtcttttcttagtcctctctaagaaaggggacttctgtcccattaaatgctgttgaccaaaccccatacagtttagcataaaatttttgccctgttttgtcctgatttctccctacctctcaggcctatcccctttattccagttcttcattctccctgaaattgtatctctacctcgaagttcagagggcatgcagaaccaaatctgcagctccaacttttctctgaatctcaaaccatgcatttctgattcctgaaactcaaggtctcaaaggacactcattatttttccatttaattcagtggaatgcaataaacatgttactaggcattgtgctgtgaaaacaaactgacggagccttcctccaaggggttcctagaagcaaaccttcctgataccagtggtatgctggtaaaccaactctcttaaagaaaaaataaaaaagccccaatttataacatttaccaatctccaccatggcttatttaaagcttctgccataacactgctgaacacagacaggaagagatacgcagaatcggctctccagagccagaatgagccagcttcagcacagcactgttggccctcacacaactaccagttattgtcccagtcatccaccctcaaatcttagaaccaaagcgtccttgatacaatgctttcccattcaccctcacatctagtaaatcagcaactgtggtgacttgtacagcaaggccctaaaactctttgaaggtaagctatgagaaattagagaagaaaaaagaataagtggcaaatggaaaaaaagtagcaagatggtagggacttaaacccaatcacgttgataattacatgaaatgtaagtggtctaaatactctaattaaaagtcagagacctagatttcttcccccctggaaaaaaaacagcaagagccaactttttgttttctacaaagacacaccttacatcataagacacagataagtaaaaaggatggaaaaagatataacatgaatgagaaagctgccaattgaacaaaattaacttcagaacaaagaagataagagacaaagagggatacttctttttttccttttcttttcttttttttttttttttttttgatacagggtcatcctctgtcacccaggctggggtgcagtgctgcaatcacagttcactgaagcctcggcctccctggctcaagcacttctcccacctcagtctccctagtaactgggattacaggcacatgtcaccatgcctggctaatttttgtattttttttttgtataattttgtaattttgcataattggggggggggttggtatagttctataattttttatagatagagggtttcaccatgttgcccaggttgatcttgacctcctaggctcaagcaatacacctactcagcctcccaaagttctgggattacaggtgtgagccaccacgcccagcagatatttcttaatgatttaagagttaattcatatgtacaccgattatacatccattagaagattttttaaaataaaacttcaaaaagatatatcaatcagaaatgtatatgcacataaagacagagcttcaaaatgcataaaatatcaactgacagaatttaaaggcaaaatgaaaaaatcttcaaatctacctagagattttttttttttttgagacggagtcttgctctgtcgcctgggctggagtgcagtggcgcaatctcagctcactgcaagctccgcctcccgggttcatgccattctcctgcctcagcctcccgagtagctgggactacaggcgcacaccaccacgcccggctaatttttcgtatttttagtagagatggggtttcaccgtgttagccaggatggtctagatctcctgacctcgtgatccacccgcctcggcctcccaaagtgctgggattacaggcatgagccaccgcgcccggccctacctagagattttaaacctcttctcagaactgatagagcaaacagagagaaaattagtaaagatatagaagacttcaaccaccctgctaacctaactggcctaattgacatgaatagaacactccattgagcatcaggagaagacatgttcttttcaaatgaacatggaacattcaagacagacagtttgctataccataaaacaacttccaatatatatgagttgaaatcatagattatatttgctgactacaaaaaagttaaaattttaaaaagagaaaaatatgtttgaaaaaccctgaactaatgtgaaactaaacaaaatacatttaaatagcatatagatcataaaagaactcacatgggaaatcagaaaatattttgaactaaatgataatgaaaatacaacatatcaaaatttggaggatgcatctaaagcagtgatgcttataatagaaaagaagaaagatctaaaatcaacatttaaagccgggcacagtggctcacgcctgtaatcccaatactttgaaagactgaggcaggtggatcatctgaggtcaggagttcaagaccagtctggccaacatggagaaaccctgtctctactaaaaatacaaaaattagacaagcatcgtggcacatgcctgtaatcccagctacttggaaagctgaggcagtagaatggcttagaggcggacgttgcagtgagctgagattgcgccattgcactccagcctgggtgacagagcgagactccatctcaaaaaaaaaaaaatctacatttaagctagtaaatagtaagaaactagtaaaagaaaaccaaattaaatccaaagtaagcaaaaggaaggaaacaataaaaataagagcagaggctgggcgcaggggctcacacctgtaatcccagcactttgggaggctgaggagggcagatcacctgagatcaggagttcgagaccagcctggctaacatggtgaaaccctgtttctactaaaaatacaaaaaattagccgggtgtggtgcacacgcctgtaatcccagctacttgggagactaaggcaggagaatcacttgaacctgggaggtggaggttgcagtgtgcagagattgcgccattgtactccaccttgggcaacaagagcgaaatgccatctcaaaaaataaataaataaaaataaaaataagagcagaaatcaaagaaataaaacatagactaatagtttaaaaactcaatggaacccaacgctaattcttagaaaatatcaataaaattataaacctctagctagactagccaagggaaaaaagacagaacacacaaattatcattataaggaatgaaagagagacttcattagaaatcctacatataatgaaaggataataagcaaatagcatgaacaactttatgtcaataaagtcaacaatttagataaaatggacaaattacatgaaggagaaaaatcacgaaatctagcccaataagaaataagaagtcagaaacaggcctaatctattaaagaaattgattttctaattaaaaattttccctgaaagaaaactccaggccaggtggctacactggcaagttcaatcaaacatttaaggatatctaatgccagcttctctcgcattctttcagaaaacagaagtgagatctcttctcaactcattctatgaggtcagcataacctgataccaaaaccagacagctattacaagaaaagaaaactacagaccaatatttctcatgaacatgaacagaaaattccttaacaaagtattagcaatttgaaccaagaataaattaaaatagataatacatcatgacaaagtggggttcatcccaggaacacaggatgatttaacatttaataatcatctaatgtaaatcatcctattaacaataaaggagaaaagccatgtggtcaacctgacagatatataaaaaggatttgataaagtacaacttgcattcgtaataaaaattctcagaaagctagaattagataggcacatcttcaacctaacctacagtatctacaaaaaaccatcagcagcaaactttatgatgaatgactgaatacttttcacctgagatctgaaatgagcaagggtatttaatctcataatttttatttaacatttttaacaggttctcatttgtgcagaaaatgattttagacatagccaatctttatgaaacttaacaatctaacagaaataagtgaattcagcaaggttatatgatacaaggtcaaaataaatcaattatatttctgtatgctagcatagaacaattgaaaaacaacgtttaaaataccatttataataacatctaaaaatccataaatacctagggataaatttaacaaactatatccaaaatatatacatgaatataattttggtaaacaaaaaaaattaccaagagaaattaaagaagacttaaccaaatggtaagatatgtcgtgttcatgggttgcaagacttggtgtattagtccattctcacactgctataaagacactacctgagactgagtaatctataaacaaaagagacgtaattgactcacagttccacatggctggggaggcctcaggaaacataaataatggcagaaggcaaaggggaaacaaggcatgtcttacatggtggcaggagagaaggagagagaaagtgtcatgcttttaaaccatcagatcttgtgagaacccactatcaggagaacagcatgggggaaatccacccccatgatccaatcactttccaccaggtccctcccttgacatgtggggactacaatttgagatgagatttgggtggagacacagagccaaactatatcacttggtggtgtcactatgttagttttgcccaaattgatctatagattcagctcagtcccaatcaaaatcccagagggttttttttttttttttttttggtagaaatagacaagatgatgataacatttatatggaaatgcaaaggacataaactgataccccagaattttcaagtatttttttaaagaataaagttggatgacttacatctaaactgatgtcaaaacttattatgaagctagtaatcaagacagtgtgctatttggcataaagacagatcaatatataaatggaacagaccagagaatccagaaaaaaatccacacatatatggtcaattgatttttaatgagagtgctaaaataatttcacacagaaagaatagccttttcaaaaatgctcctggaaaaactgaacatacacatgagaaaaaaatgaaccctgaatcttacctcacaccatagacaaaaattaacccaacttcaagcatagagctaaactttgtaaaatctaataccacaaagaattctggaggaaaaataggcaaacatctttttgatcttggcacaggcaaagattttttagaaaggatacagaaagcactatggaaaagaagaaaaatgggtggataaatcagacttcatcaaaattaaaaatatccactctttgaagacatcattaaataattataaaagacaaagactggtaaaaaattgaaatacaaatatctgacaaaagacgtaccaagatatacaaagaactcttatacctcaaaaataaaataaagacccaatttttaaaataagtaaaagatgtggtcagacatttcccaaaagaagacatactaacaaccaacagcacacaaaaaggtgatcaatgtcattagtcatcacagaactgcaatgagatgcactacactacatagacactagaatgtttaaaattaaaaagatttatcaaaccttagagcagatgtgggacaactgggaatctcatacatttgcacatattgttagtggaaatataaaatgatacaatcactttgggaaacagtttggcagtttcttatagacatatacttacatacaaaccaatgatttcacttttaagagaagtgaaaacatatggccatccagacttgtaaacagatgcttattgggcatttactgagaatcttcttttttttttttaagacgggctcactctgtcccccaggctggaatgcaatggcacactctccgctctgctcactgcagcctcaacttccccaggcccgagtttttctcccacctcagcctcccgagtagctgggactacaggcatggaccacaccacatctagctaacttttgtattttttgtagagatggggctttgccacgttgcccaggctggtcttgaactcctgagctcaaccaatccacccacttcaacctaccgaagtgctaggactacaggtgtgagccaccacacctggccccactgaacatcccaatggatgaataagtctgaagtagtagacttactcataatatccccaaatttgaaacaacccaaatgtccatcaacaggtaaacatgttatgtatggtataatcatgcaagggactaataaccagcaataaaaagaaacaaactatttacgtatacaataaatcccaaaactatgctgagcaaaagaagccagacatgaggctgggggcggtggctcgcgcctgtaatcccagcactttgggaggccgaggtgggcagatcatgaggtcaggagcttgagaccagcctggccaacatggtgaacctcatttctactagagatacaaaaaattagccgggcgtggtggcgtgaacctgtaatcccagctactcaggaggctgaggcaggagaatcacttgaacccagcaggtgcaggttgcagtgagctgagattgcgcctttgcactccagcctgggcaacagggtgagactccatctcaaaaaaaaaaaaaaaaaaagaaaagaaaagaagaagaagaagaagccagacatgagagagtaggtgctaaatgatccattcataggaaattctagacttcttaacagtggatgattttggcctccgagggacatttggaaatgtctagaaatatttttggttgtcacgagttgggataagctactgacatctggtgaaaggaggccagggatgcgctaaacatcctttaatgtacatgacagacccccacagcaaagaattatccaaattatccactactgacccaaaatgtcaatagtgccaaggctgagaaaccctggacaaaactaatctatagtgacagaaaaaaggttggtgattgccactggctgggggtgggaaagtgagggttgatcgcaaaggggcatgtgagtggagaaaatgttttaggtcttggttgtggtaaaagggaagcatttcattttacacaaattataccttggaaaaattgacttttagaaaaatgaccctggccgggcatggtggctcatgcctgtaatcccagcactttggaaggccgaggcaggtggatcatctgagatcaggagttcgagatcacactgacaaacacggagaaaccctgtctctaccaaaaatataacattagctgggcatggtggcgggtgcctgtagtcccagctactcgggaggctgagacaggagaatggtgtgaacctgggaggcggagcttgcagtgagccgagattgtgccactgcactccagcctgggtgacagagtgagactctgtctcaaaaaaaaaaaaaaaaaaaagaaaagaaagaaaaattactctgaatgctacttcaaaatacttttttttttttttgtcattcccatccatcagttaactaccttgtaaattagcctgagcaaacatctcagtagtgaagctattttctttattggatgagaccttaggtacagaaattgggaaaccccacacatcccacaaaattgaatccatgttttctaataggaatttgaggagagtggaaccaacagagtagcaagaacaaagaaacctccctgtcagccaatagtattatagtatcatattattacatacatacacatgtgtgtgtatggagacacacacagccatttgcacatgtgctatttgcatggtgcctggtacaaagaaaggataaaacgagtgttaataacccgtgcctcaatgacacattctttatgcttttatttctacatccattgatggtttaataaagccaaaaggccaggcacagtggctcacgcctgtaaacccagcaccttgggaggccgaggtgggcagatcacctgagatcaggagttcaaaaccagcctggccaacatggtgaaaccaggtctccactaaaaatacaaaattagccaggtgtggtggtgcgcacctgtaatcccagctactcgggaggctgaggcaggagaatcgcttgaacctgggaggcagaggttgcagtgaactgagatcatgccactgccctccatcctgggcaacagagtgagactctgtctcaaaaataaataaataaataaagccaaaagactatttagccttttagctaggatgcagtcttttggaatgagggtactgtgaagagaaggcagcttctatcagaatcctctcagaaactcaccagttttggagtccttctcagtcgtgagttggaatgagctcacactggcttctgagagctgatcgtggtcttctcttccaaactcccagtttagtgacctcaagttggtagttggaaatcgaccatggtggaagtctttacaccatggaaattggcaaatgtgacacatcagggcttgttcccctggagagccaggcgtgaagtgtttgccggcacatcactgcctctgactcagagagaagtgaaattcatatggaagagagaatgcacgtgggtgtgaacatgaacgttgtggtttgaaattggtgatttttttcctcttatgtcatgaagacagttggaattgccctgacgatccatcttcccatgaaaaaaagccaagggggtgtgggtggggagcctggataggttccatacagtattttaataaaaaattgtaatgtagcctgggggcttctggttaaacaaaacaaaatatttagtttaaaaacctgttcttcacatagaataaaggtgaatgagagtatagagttgggtgagaccttagccacgttctcaaaggaaggacagagaagccctaattcagggagggtttggccacagtccctgtgtgatgtgcttcagatattcgtcatcctgcaacaagctggagaagacagaggcgttttgcttaagggccccagcgtgagtgccaggcagggctgaggcatcctgcccagcgcttcttgccccttacttcctggctgcttctccaagctggcaaggtcagggtggatggagagaaacatttcccagaggccagagttgcccatgagaagtggctctgccctgaactgtctctcattttctgggggccagactgacctgtgaggcaaagttgacttcttcctgatatggggaacaaggagctcaaccagatatccaagtgtggctcagcttttgctgacgcttgggagagagctgggagccagagacagttctgtggcttgagggttcctctatggattttatttaaaccacctttttttttttttttttttgagatggagtttcactctgtcacctggactgcagtgcagtggtatgatctcggctcaccgcaacctccacctcccaggttcaagcaattctcccacctcagcctcccaagtagctgggattacaggtgcacaccaccatgcttggctaatttttgtatttttagtagagatagggtttcaccatgttggccaggctggtctcgaactcctgaccgcaagtgatctgctcacctcggcctcccaaagtgctgggattacaggcgtgagccactgcgcccagctaaaccatctgtcaaatgggattttaggaacagtgttgggtcactacaagataccagcccgtgtccctgggcttggaaatgagacctggaaagttgaaggccttctctgagccccatctgagggcgtatgtaggagagcctaagctgcctccattaccccaggcaaacaaggaagagcagagagaagtggagaaccccacagccaggagaccctctgagcaagccagagctgggcccagaatccagcccacagcctttgcctctaaagaacctggaggtggaagcatcaccagcgcagtccccagcctcccagcacaacagccaacagcggggcagggcaacctgctctcctgggtggggctcggggaggagacctctctctgcggcctcctccctctgatagtgggacttttaaaacttgatcaaaaaaataataataaattaaaaaagaaaagaaaagacagcaaacaagcacaaaagagcaggcggggaaaaccctaggtaggaatcaatgaagcctttcaaccttcttccctgcaaaagtctgcatttctcttgtctttgggaacccgctgaatggctgggaaactgtttttaataaacaagagttcaaacgctgagtctccatagccaacagtcacgccttaaactctaaactttacatgaaaactctcccagtccctttgaactctccttccctctccgacggagcattccagtgtttatgcatttttcgagattgctggcaggattgcgaggcgctttgaatactttccctctctttagcaatctcctgccttcagaacccattaatgccccactcagcaacatcaaggtaatgctttgaagtcccttctggctacaggcctctcacactctttggttactgtgcaatcaaataattaaatggattctcagggaaaaaaaaaatcattcttttccttggtaattaaatactccaggttggacaggagcgctgtgttgccaagggagtgagaatctataaagactccaagcccagaagtctatgctgatggcccccaggggagaaaaataataacaagcaagtcagctcaatcctcactgcccttcttggctggcagcaaccctggcccaccccgggctctcctgtctcagggcctcccttcctagggctggggatgggggcggcgggggcatcttcttttggccaaaataagcttgtcagagactgtggctgccggaggtcagggagcaggttctactcccctcccagggggattatgcccctaaggaggcagaagcggggcaggaagacagggcagagggtggaggaagggagggtaaaaggagcaggggggagacgaaagaaggggaaagaagaatgaggaagagagatgcggaaggcagagaatgggtgaagggggggcagggaaaggggagagaaagaaaggaaggagcagggagaggggtgagggagaggtgtgggaggagggagaaaatgggggaggagggggagtgaaaaactgttaaggtggcagctgtggctattggtttctttcctctctgtcttccacgcctccaccagggtctgcttctcccagaacagatctgactcccacccttcgtctgggtaaagccccaacctggaaaagtccagggcagcccctcaccacctgctttgcccttatagcctcaactctcacttctttcccaccttcttgcccttgcccaaactgctctctctccctgaattacccttccactgtcctcctgaccacccccaggacccccgaagtctcagctcagcagtgaccttcctctggatgttcagacaagttttattcaagcaacttttttttttttccccaagatggagtctcgctctgttgctggagtgcggtggctcaatctcagctcactacaacctccgcctcccaggtcaagagattctccttcctcaggctggggttacagacacccaccaccacactcggctaatttttggtatttttagtagaaacgaggtttcaccatgttggccaggctggtctccaactcctgacctcaggtgatccaccagccttagcctcccaaagtgctgcgattacaggtgtgaaccagtgagcccgccaactttttttttttgagatgaggtctcactagactcctagactccttgctagactcctagactcctagagactagactcactaactcctagattcaaacaatccacccacctcagcctcccaaagtattgggattacaggcatgagccaccatgccaggctattcaagcaacttctccaatgaatcatgatctctcaatcaggtgctcctctgggttggggaccacattttcatggcctgtttccccacccctaccaccccctccacacccagcacaggcccatggtagtcctcagcaggtgctggtgatgctggcaatgacagtgatgtgcagaagactaccaaagaggcttaggtcccaagaagcactttttaaaatggccgctatataccctatgctttgtttatgagcatctcaacatggcatcctctgtgactggaacttggagcatctcttcgtcactcccgtcttgtattccaaagtggcccattccccctctctaaccatctctccccatgtggtgtatgcacctgaatgtccaggaacttgggctccctgacatccaaattggccttgagaatagatcccccccaacccctaggacaggagccatattattagtcagaattatttgcgttggccatgacaaaaacccaagacaaattgactgaagaggaagaaaaaaaaagatgacaggatttattgactcccaaggctgggctttcagagcagttgaatctaaggacccaagtaaagtcataggacttagtggatctttttctttacccccaccctgccatcttgtggctcctatttccttcttagtggcttcaatcccaaaataggagcctttcataccatggcccccagaagcctaaggatttggttatcccatttcagaaacttcaacagggagagagcaccgcattctctgaattcatggcacaagtcccaggtgtgactctcattggaacaacttaagtcacatgtccctccctggaccaatcacagtagccaaaatgataagctctactaattggccagatcatatgagcatctttgcagccgaagggtgctccccaaaggaataccaagatgttaacatcaggaggtgaaaacatggatgttgggccagctaaaacaacagataaccactgcaagaacaaatcttactggtgccatttatggagattcttagagggaggtggctgggaagacactgtgtgttagggatgaaagggtagagacaaactaggatcagaaacaagatctcatcagatcttgtacaaaggtggaaggtgtggagcaatggaaccaggcaagtagtagacaagccgagcaggtgaccaaggagcaggacctcccaataggtaagggggcagggcaaggcggcaagaactccaagccaaattctgtcccagtccggaagtcaatgatacaattcctggggagtcagtagcctatcctgggctcagcctacctcctgcctccaagtgggagaggctatgctatgcctcttgttagaaaaagtcgaggcatcaaagcagttctagatgggggtggaggtggtttgcagaaatgtccacaaactctgcttgaagcaacgaaagtcttcacacatggagaaatttatcctgaaaaattatgagatgctcagaacgctttatttggtcaagagaagatgtcatctattgaaaggaaataaaccaaaatgttatcagatggtatctccgggtagtggggattacagttgaatttctttgtctttttcataattctatgtgttttccaaattttctaccatgactatttatttttgtgatcaggaaaaatacaaattgaaggggggaaaacatcctgaaactgttcctatcaaatgctgtataagccaatctttcacgatcataatccacttttccatttattttattttctcgctgtgtctctgcttctcaccctgggtatccctcagtctggataattggcctctggctgcctggaagcagtggctgaagcagtcctattccctaaagtgaggttgggagggggccctgcttctcccagctgaggctgggccaggaagccctagcaatggttcccactgagcccggctgctgctgatgaaataggactcagatgtccagcagctgtgaccctccccaagcttggatccctccccctcctctcacctcctgggcttcttcaggcaggatgaatgaacaacaaaggccttgtggccaactcagccatgccaagaaatgggtgtcatctggaggacgtgtcagcccaaaccttttatgttgacaaaccatgtagatcagaagactaattgcttcttgctgtcttcagcccgccaagggctcaacaatgatccacaaatcatttataaattgatgatcacaaatgactttaccctagtggaactagacacccacgcacccattgcctgattggggatgggatttgagacttaatttacaaacaaaggtcccagccaggacaggaaaccctccccaagagtcaataagaccactcccaccctcaagcaacccagtagttaattccttcccttggaaaaaacatggtggactcacactcacaggcctgtgccagactcggaatcccagaggaaaagagattttgacagctagtggaagacacagcctccaggccagtggtccaaaagccacggaagattcaatgctttcagtgctttatattatctccctggaaatctttggagacagagatttcatagtttctcccaatgacctactgcagagttttatatcctggtaactgagatggtttttggaggaaccattgcatctcctgcttttctttttttttttttcttttttttttgagacggagtctcgctctgttgcccaggctggagtgcagtggcgtgatcgcagctcactgcaagctctgcctaattttttgtatttttagtagagacggggtttcaccatgttagccaggatggtctcgatctcctgacctcgtgatccacccgccgcggcctcccaaagtgctgggattataggcgtgagccactgcgcccggcatatctactgcttttcatcctgttttgtcttccatgagcatagagggaaaggctcagatcctatcttcatcttcagctgggcaaagacaggcaacttggattttccagtttggcccaggctgggtagaaatgaaaactagagctgtgtgtagtagtcaggagagagtaagtccaagaaaatctggcttagcccgctcaggtttgtgaagggaggtaggcaggggaaatgtagttactgagacaatttgcagggaggagtgctgatgtcttgcacgtgataatgtaagtttctcctggaagtgatgcttaaagttttgttttttgaaaagctgtccttttctttttctgttaggatggagaaaatgacagctgtgataatttcatcagtccagagatagacagcactctagatcactgttatgggttgaattgtgtccacccaaaaagatatggtgaggtcctaactcccggtacctcagaatgtggcctgatttggaaataaggtctttgcagatgtaatcaagttaagatgaggccaggcctggtggctcacacctgtaatcccagcactttgggaggccgtggcaagtggattacctgaggtcacgagttcgagaccagcctggccaacgtggtgaaatcccatctctactaaaaacacaatattagctgggcatggtggcacatgcctataatcctagctactcagaaggctgaggcaggagaatcgcttgaacccaggaggcggaggttgcagtgagccaaggcagcaccattgctctccagcctgggcaacaagagtgaaactctgtctaaaaaaaaaaaaaagaagaagaagaagaggaagaggaagaagaagaagaagccaggtgcagtcgctcacacctgtaatcccagcactttgggaggctgaggcaggtggatcgcctgaggtcaggagtttgagaccagcctggtcaacatggtgaaaccctgtccctactaaaaagacaaaaaattagctgggcgtggtggcaggcacctgtaatcccaactactagggaggctgaggcaggagaatcacttgaacccgggaggcggaggttgcagtgagccaagatcgtgccattgcactccagcctaggcgaaagagagaaactccatctcaaaaaaaaaaaaaaaaaaaaaaaaggagggaaatttgatttgatttggacacagacatgtccagagagacaactgtgtggagggatgcagggagaaggccacgtgaagactggagttgtgctgccacaagccaacaaatgtttggggctaccagaagctgaaagaagtaaggaaggcttcttctccccgaggtttcagagggaccatggccctgttgataccttgacctcagatttccagcctccagaactgtgagacaatatatttctgttgttctaagccttccaatttgtggtactttgctacagcagccctaggaaatgaatacagtattttaaacagaaagtaaattaatacagagaacctggcactttgaattttgtttaaagagtcgacagaggccgggcgcaatggctcatgcctgtaatcccagcactttgggaggctgaggtgggtggatcacaaggtcaggagatcgagaccatcctggctaacatgatgaaaccccgtctctactaaaaatacaaaaaattagctgggtatggtggcaggtgcctgtagtcccagctactggggaggctgaggcaggagaatggcatgaacctgggtggtggagcttgcagtgagccaagatcacgccactgcactccagcctgggcaacagagtgagactccgtctcaaaaaacaaacaaacaaacaaaatatatttactccctgtctcatggataaataagtatgcaattaaataatcacaatttcgttacaaattagaatgcagggaaatgaatgaaggaagttctgcaatggagaggatcagacggtcacacacatggatcccatagtcagagaagacctctgacattcgagacaaaacctgaaggctaaaaggagacaaacgtaggaaagggtaaaggagggtgcgtgcccagcagaggggctgcatacacaaagctcctgagcagcaggtcactttagggcagtggaccccaacctttttggcaccagggactggtttcgtggaagacaatttttccatggacgagggcggcgtgggagagatggtttggggatgaaactgttccacctcagatcatcaaagcattagattctcataaggagcacacaacctagatccctcgcatacgcagttcacacacagtttgcactcctgtggcgatctaatgtcaccgctgatctgacaggaggcagagctcagacagtcatgctccctagcccgccgctcacctcctactgtgtagcctggttcctaaaaggccacagcccagtacaggtctgcagcccaggggctggggacccctggtttaggggaacaagaaggtcagcctggagggagcacagaggatttgttttcaaaactaggcattggatgaggtggaggaggccctgttcaggggccgtggttctacctgaggcagacccttctaaaacactccctacacacacgtctcctgagctgccagacctaaggtcctataccgattctccctgtttgggcccagagactgtaccaagcaggcggcctgctccctgggataattctggtaatagacaacatttatcaaaatgcctttcttttttttctccaaaaattagccaggtgtgcatctgtagtcccagctactcaggaggctgaggtgagttgggaggatcgcttgagcccaggaggttgaggctgcaatgagccatgatcatgccactgcactccagcctgggagatagagcaaaactctcaaaaaaaaaaaaaaaaaaaaaaagcttttttttttttttttttttttttgctggtggtggttgtttgtgtttgtttttaaaccaagtcaccactacccacttcctgagacaaatcatggagtagagtctactcatatcagatttctaagaaatacagttgagaaagtgagataataaccactaagaaggacgtaaagcattcttttgatccttctgtgtaatttggggtgtttctatacaactacattatctactaaaggtaaaaaaaaaaagggagaggaacatttttctaaaccctaaaacaaaaacaactttacctgattattcaagtagactgtaatattttctcgggggtaattgccaatttccttctttttgacagcatgatgatgaccctaaaattttctagagtggggagaataaaatgggattttccccccaaaatccaacatttcagactctttcacacaaactgccatcctggctgcgagcccatagagaatttccaagtactgtaaggccctgggcttgataaagaaaaatttacagatgctttgtggccaaaggctgcctccagcagcaagtctgtttccaaataaagcaagctgcaaacccactctcccactgccttgggcaagagagcagacggcagcccccaggtggtacagcaggaaggctgtgagggtggattccacacgaggagcaaatggtaacaagtgggtgagaccctcacccatgtcactatcacagccactctagacagaggactcacgtattatcctcattgaacaaacgaggaaaccatggctccctacgcggcccagctgcgagtggactcaaacccaggtctgcccgacccacagcctgctcttgacctctgatcatctggttaagaattaatcagataaataaggcagcaacatagggaaaagcccaggaagtgaaggcgaagttatgtgatttgaagctagagatgaaaaacaggaagatcgggggggattaaggcaacaggacgctggtgtgcacatgagtcccctggagaggcgggaaacacgcaggtcccgtctagccaatggaatggggtgagcctctgcctctctcaggctcccacgtgagtccactccatggtcctcagaccacactagcaagagcctgggggagggagggaaaggtttctggaagagttgggtcttaaattatttggggacaaggaatagagaagctgacagcccaagccatgggttttagcattttctctggaggcacaaatccctttaagaatcacataaaaaatatagacccttgcctcagaggaaggcatgcgcaggtgatactgtgaacagtttcaagggctctcaactcccagaagcacatccacatgggattaggaggccctaagtgttaatatgacagagaagcacaaaaatgggcccctcttagaacaggcagaaatatacagttccaaaatatataagagctcctacaattcaataacaagaaatctaatagcccaatctttttttttttaattggagatggagtctcactgtgttgcccagtctggtcttgagctcctgggctcaagcgatcccccaactttggcccccaaagtgctaggataacccaatctttaaacgggttaaagactttaatagacatttctcggccgggggcggtggctcatgcctgtaatcctagcacaggattgagaggccgaggtgggggaatcacctgaggtcaggagttcaagaccagcctggccaacatggtgaaaccccgtctctactaaaatacaaaaattagccgggcatgatggcagatgcctgtaatcccagctactcaggaggctgagacaggagaatcgcttgaacctgggagacagtggttgcagtgagccaagatcacaccagtggactccagcctgggtgtctgagcaagactccatctcaaaaaaaaaaaaaaaaaaaaaaaaaaaagacatttctccaaagacacacaaatggccaacatgtatttgaaaagatgctcagtgtcactaaccatcagggaaatgcaaatcaaaatcatgatgaggtatcatctcatacctattaggatggctattatcacaaaaaaacgagtgttgatgaggatgtggagagattggaactcttgtatactgttggtgggaatgcaaagtggtgcaaccactgtggaaaacacttcggagattgctcaaaacatttaaaatagagccgccatatgattcagcaattccacttctgggtatttatcaaaaatcattgaaatcaagttcttgccaggtgtggtggctcacgcctgtaatcccagcactttgggaggccaaggcaggtgaaatacttgaggccaggagttcaagaacagcctggccaacatggcaaaaccccatctctactaaaaatacaaaaaattagatgggcatggtggcgggcgcctgtaatcccagctactcgggaggctaaggcaggagaatcacttgaccccaggaggtggaggttgcagtccattgcactccagcctaggcgacagagtgagactccatctcaaaaaaaaaaaaaaatagagatgatcaaggtcttgaagagatattggcacttccttttttattgcagcattattcacaatagccaagatgtggaaatgacctaagtgtccatcgatggattcgtggataaagaaaatgtaatataaatacacaatggaatactattcagccttaaaaaaaagagtaaaatcctgtcatttgtgacaacacggatgaacctacagcacattgtgctaaatgaaataagccaggcacggattgacaaatactgcaggattccagttatataggtatctaagtcaactttgcagaattagagagccaaatggtggttgtcaggggctggagtgagggggtaatgagttgctggtcaatgtgcgtaaagtctcaattatgcaagataaataagttccagaaatcttctgtgcaacactgtccctatggttaacaatactgtattgtatacttaaaagtttaagaggggccgggtgcgatggctcactcctgtaatcccagcactttgggaggccgaggagggcaagattcacttgaggccaggagttcaagaccagcctggccaacatggcgaaacccagtctttactaaaaatacaaaaattagccgatgtggtggcacatgcctgtaatcccagctacttgggagattgaggcacgggaatcgcttgaacccaggaagcggaggttgcagcgagctgagattgtgccactgcattccagcctgggcaacagagcaagactcttgcctccaaaaaaaaaaaaaaaaaaaaagtttaaagatgaaaacaggggccaggtgcagtggctcatgtctgtaatcctagcacttttgggaggtctcaggagtttgagaccagcctgggcaacatagcaaaaccccatctctactaaaaaaatacaaagattagccagccgtagtggtgggcgcctgtaatcccagctaatcaggaggccgaggcctgagaatcgcttgaatccaggaggtggaggttgcagtgagccgagattgcgccattgcactccagtctggatgacagagtgagactttgtctcaaaaaaaaaaaaaaaaaaaaaaagaatgaaaacaggagatagaaacatgagtgatcaactagtccagttctctctcacaaatgcaccttagaagatgccagaaacccgctcatggcacccagagggtggtggtgctgggccttcagtccagtttgtctgaggcccaagccccaacctcatcactctcctcaatcaagaggcctgaagatagagatgaaaagccatccacaaaccccaatcttcaccacacacaataggttgcatctcttcatccttttgtcttggaaagaagtttacaattcggaaagtgttggacaccctggtatgaacccccattccagccaggaggggagggcacagcacctgcatggttagggacaagttcaaggcatcagagctcctccagcctcttgccagatgccctcacatcctcgccttctcagagggtaactcaggactctcccagcagccttgacaactcctactactgccaccactccgaggctactgggttcgagtccatccctaccccgcatggccagaaccctggcctttctctatgctgccggcctgacgccagttggcagcaggaagaacaagccaagcagatccactgcagaccaccgagttcatttcatgaaaactcagcacacaagaagtcaagtccaactgcagttacagatcctctgtttttaaaaagggttcttcctaggactccactaaaaagacctgctttcccagatctaaagtatggcctggcatgcaggccaagtgctcaggatacagggagggcacgtttgttgagcgggcaactgcctgccgaggtccttggccacataagcacacctgtccaccgagcggtgcagaagctgcctgtgtcgcctcctcctgaaccacctccttgctatgttcccgacacctgaccggccctgagcctgatggctcacgataaaatactgataggattaatagtcagccttgttgatcagctcccagaatggggagggtgcctggctagctttgatctctaagtccattggccccacgtggacattccaggtctatgaaaccatctgctgaacggctttcatgtcggagacacctgttgaaactcctgggagggcctcctctcatcccctggtcccctgcacctacctggccggactggagacaatctgcccaggaggaagaggctgaatggaggtgttacagggaagaggacccccaaaggagatgtcatctacagcctgctccaaggcaagaaaagcctcagccagtagccaggtgatttgaataaatggctttacaaaacctccaggtgggtccagatcaggtcagggctcaaggtcagagacgggcttgggcaaggtaggaaatcaagcacagatgtctacacacaaaagggcccctcggccctgttcccaccctggggattcaaagacgaggccagtgttttgaaaaatataaaattttaataaaggctacatctcttaattacaataattattgtaccaagtaattttccttaaatgaactctttataatgcataatttacagtataagtagaacaaaatgtcatgacaaaagtcattgagtacaagacttgtaataaaaaggcataaaatatatttatacataaacccctttcaaaaaacaagggaaagcttgagccctcaatatagggcgacacacggagcgggtgaccgtgcaggtacaggtactgtactgatttaaagtcaagcactagagatagtggattaatactcttttgccgtacactatatacagatgtatagtacaagtaacaatggcaaacagaatgtacagattaacttaacacaaaaacccgaacatcaaaatgaaggtgtgtggaggaaaggtgctgctgggtctccctacaactgttcatttctttgtggggcagggggtagttcctgaatggctgtggtccaatgactaatgtaaaacaaaaacagaaacaaaaaaaacaaggaactgtcatttccacgaaagcacagcggcagtgattctagcaggcctcagggccctgggcctggggaggctacatgagggggagcctcagtcacaggatcaacctggggcccgaaggagcagggttccctgcctctccctctgcaacagatcatcccatccaacacaacccccaaaatgttgatgatgacgcaacatggtcaaccctcaagacctttaagacaaaacagagcagcataggaaaaaaaaaaacaaaacgcaccaatttctgcatgtgtcaatggtagggcaccattttaaaaagtctgtctaaaacagtctgtcttcacttggagggacgtagtgcaaagcataattcctctgttagtgaagaaaccatgaacgcactcctagctcaactcctaagtttagtcagaacaattaaaacttcctgtctcccccttccaagtttaaagcagcatatccataaactggggatgggggaaatcaactgttctataaatatcagtaaggattcctgttcaggtaagctatacacagtttctcttagtttatggatttcagatccctaggaagtcatatattatgtatggcagtctctcaaatacaggcagcatcttcaatagccaagagtggtcatgtttttaataaatagttcaggcttttcttatctcagtcagtacccagctcatgaatcatgaaaatcaacctccccccgccctcccgaaggcccactggccgattcttccttagactttgtcttcttcattggtttaattttccttcaaaatgttttgtcgcagttgctcacagccaagacagttcacaagagcttcgggctccaacagttcaccaaagccagaccccagggctcaatcgatccgctccactttgcccagaatccggccttcatacatcgggagcaccgtctcatcctcccagatctcctcaaacaccgctccacaggcaaactcatcgcttgcttttttgaagtaataccttaaaaggaaaaccaaaaaagcttcttggtaaactgcattttccacattgttgaaaagaaaagcataccaacatggaggactgaggtatcctaggaatttgctatggcaggtgtgcctgtacactgttgcgcacatctgctttaagacggcagctgggactggccacaccacaagaagcaggtgggccgagatgatgaaggccaggcacccactgagcagcagcctgggctgggcctgccacctgcaatcttcaacccagcacctctgctgtctcctgacacgtatacactgtgaaaagcagagctgctttccccccgccaacctttttcagcagtggggtgggggagggaagggaaggacaaatgcctgcagttcctttgcagcaggagccaagcaggtccttcaaagagactccagactatctccaggttcagccatcctgaacccatcacacctggagagccggaacctgccgaagtctgtaaaaggctgacttccagatggtttagcagtccaaaggcctctcggccttcccatcctccaggtcccaagtgcaacactcctggatggccctggcacagccacacaggaggcaagccagcccagcgcagcttcccagggccgaacagacggcactggccccatgatgccctcccctcttctccccatttccaggcctcttctcccatcccatccctccagggtcaaacaccaaaggcccttctattatgcccgttgattaaaggctcctttcatccctccccagcgttctttcttctgaggctgtttaattgtacagatgcaaatgcctggcctctcaggagtgccacattcggaaacaactgctgtcctcttgggccaggcccacccctaaaccccttccgaggaaattaagcaagggcctcttccttccctgtccccagccaagggagacccctcagagggattaaacttgcccctgcaagctgtcatttccagcccataaaggccactcacagagggaaggtcacagtcccctggggggatgggagaacctttcaagcatttaattgtgtctcagggttatggttgggctttgtcttttccctttaaaaaaaaaaaaattaactccccttggttagagctcaattttttccctctttaataaaggcaagccaaatactttcgtaggagataaggctaaatacagtgaacagctgggtttagtcaaggttctttgtttttagcattcctgacccagctaatgcagtggggtgaacaacggcatggctctgactaggcagcactgaagacacgtcatgtcaaggggtcaaaattctcgggggagcgtgagaggagacagtgagaaaatggggaggggctctgtgcacaggagactcaggacagtggggggaaaagtcacttctccacataagaggctcaaatcccaacgccaccctccgtcagacccctttggccccagctccgacccctccagggtttaccaagttgggctttcacagcatgtctgagcaaacacgcagcgaccttttacataattgcaacctcctccagagaggagagaggccacattctctcagccccacccccaggacttcaaacacactgcactgccctcattttctccaagaaacaggcttttccactgcaacatgcttcatgtggcaaactttgctttcttctgacatctggcaccaacagcgtctggcgcgtctgaagggactgtttgctttttgaacccctgccatgttgagattactcaacgcatcccaggtcccccccacctcccacccctgctccacggccccaacctcactgggtcttttttatttttttgaaggggggatgtatttgtacaaattgagatgttgaagcaccagccctgctgggagggtgaggcgtgacaccctgtgtccctgtcctaccccaggaggacactgagtctagctcaggccctgcagagataaggcagctgggagggccttcccacagcctgatccactcaggaaagaactggagaggatcggagagttgaccatttgtgcaagtctttgtgcattaaaggggaggccagggcttcaaagccaggcttattaactgtgcctcagggagaaaaaaaaaaaatcagagccagatgtggccacagcagctgaaggaggcactttccccacaagcctatgccagcgccacatggctcttctccaaggtcacctgcagttccactcgaagtccagccgagacaaagccaagatcaaaatgaatccccagagggacacacttgtgtcattagtttcaccttgtgtcttttcaagataaaagcagcagcagcagcagccaggcctgttcccccacccctttgataccttttcacaattgtctctgcccaggtataaaagggactatccagacccagcaacacgccctgctggccagttacctccaggggctcagtccaacctccatcccctccccactccaaagagaatcactttgagcccccgcccaaactaactcccagatgaaggtggctggtaaaactatacaaggcctgctctagaggggagggtgtctcagagccctgcaggtggactcatccccgtccaggagcccatgcccacctggcaggttaccaagtgctattcagagttttccactcacacccctggccctggtggcggcaacgggttcacacctgggaatagactgtggtcctggcacagggacaacagcacacagctgaggagttggaactctgtcttgggtgtagaccccagagtgagcacctccttaaactagggtgcccctgtctcacccttgtcccagcctggagccctaaacctgggaaacctgggacagaactggagcagaatccacacattctcttgggctgcaggccatggagaggggcaagggaggactccagatgaactgaggcagagtcatcacctgctccttacgagggaaatgatcaagagaaggaatggcctagggctggccctcatcctcctcagctcttgaaccctctcaagggccctaaaaagtcagcatggaccttctcaagggcacctccgtccactctgcagacaaggtaaggagaccaggaagttcccttcctgaagcccctgcaggggagaaggcagcggggcccaggcctggacaggaggagtagactgccctattcaccctgtgcccacccgcaggtccagccccttctttgttatggacaaaggcgcatctctgcttctaatggcccataaaatccagggaggctgttcaggtggaaaggcagggtaagaaaaacacgggggacttttcctaggcatggttcctgactatttggagccttcaatgtgggggtctctcctaaactcaagccagtagggcggcgcttccagaccctccctcctaatcagtgtgcctgtccctctttttgctccctgctccccactcgcccacaagcccctcaattgcaggtaaagcctctgcagtgtggcctgagccccactctcctgtcggtgcaagcagctgctccttttctctcctcagtctggttcacctggtggaaagagcctggccaggtcccccagagaaccctccacgcagcctccctcttgcggctgctgcttcgttattgctgctagcggtgaggggagagaagaaatgagaagggagcctcccccagcgcctgctgagccccctcccaccctgccccacctaggtctgctcagccaggggagctgctccaggctctggctcttggttctgagcaaacaaactgagagcagaaaaaagccacaggactcttacctataatttccctttttgctgagctgctctttaaagtggcccagggtcaagctctgagccttcagcatcctccggtatggaatttcttccccacagaaaaagtaagtgacaaccaactcactggcctggagcgcgtggacacctgccagtttctttggctctttgtgactgaaaataagatggaatggaacaagtttagcattttaaagcagacacacatctaaagcaaacacacacgtgcgcacatgtgcataagtgacagggtatccaaacactagggctgcaattgtaaacccaaagtgggggctggggcagagccccacatcccagagtcaggcagctctgggggacacacagtccaaccccacatgtgctgcatgcagcatgcagaaaaggatgatttccttttggttgtacaaattggtatcatttcccccaccgccaccaaatgaaagtatacggcggcctctttcaggctggcataaatggggtgcttcctcaagaagatgagagaagagaaattatcacagagatgccgggtctcacctggattggagagtgctaaagagacaaacccagagcaggacacctttgggatggcatgatctcagaatgcctaaagcccaccccttattccagcagaatgagaacaactaatgggggttatcacacagtcatgtccatttccccatttcttctgagattttgtagaatggcttgaaaaaaaggctgctaggccgggcgtggtggctcacgcctgtaatcccagcactttgggaggccgaggtgggcggatcacttgaggtcaggagtttgagaccagcttggccaacatggcgaaaccctgtctctactaacaatacaaaaaaggagctgggtgtggtggtgggcgcctgcaatcccagctactcgggaggctgaggcaggagaactgcctgaacccaggaggcggaggctgcagtgggccaagattaagccactgcactccagcctgggcaacagggcgagactctgtctcaaaaagaaaaaaaaaagtggctggcccagacccagagagctggtacacttagggtcaaccaattgaaacaatgaaagggtccagggcagtggcctattgaggacttcaaacattgctcattgctcaggatgaagacactaagaaagaaaacttgatacagaccattttagatctctttagcagatttctttttaattgcaccatccagtaattaaacgagcaggctcctcaacctactttgaaagagactaaatttacaaaaagaatcactgcccaatttgggggaagatattctgtcttctccaaacaaaaacacaaggatggtcccctccacctctgccacagtggagaatgatctttctgctcaggggtgacaaatgtttccagtactactaaattgcaagttgaatgggggcaacttttccagctgaatttgaggtcccttctacacttctgctaatggcttcatgtcccagcttttgatttgtgtatgaccagaaaaacttttgctatgatgcatttgtcggcaggacatggatggcaacatctacgtttactgttcctcatcactagcgctaaaatcaaagtgattttaaaaaccaaaaaaagtttcatgaaaatgaaactccagatagcgaatattctgaaacataaagcactcggcagatctcagtaatgtcaggtaaagacactcactcttctggagccaggcttggattggagaagggtgtggctcccgtctgaacagtggccgaatgattcctgtccctctgctgactggccacacagcacctgaggacacagccagggcgagggatttagaggtacactgttgtccccagagcaattgaaaagcagacagaaaattactatttggcctcctgaagagacacgaacccgacttccatccttacggagacccaaccaagaccctgggttaacagtggctgaagaggccaggaagacgtcttggaacagccattctaagcccccctgggagcccaggatgggacattctcagccccagcaaagggctgaggactcttgatcctccatctcacagcttcttatatactcaactaaccagccttaaacaatcaagacatttgtaaggaatgggatttgtaagcaattgctgaaattcattctcccaattctaggcatgacttgcctcacagatcctggcttaactctagtagaatgaacataactgaagggaacaatttctagaagctggaaagcagcagcttactcatccataagtaattcttcttctcatgggagggtttgagacccaggcagaaagagaggccctccccattagccacagaccaggtctccacccaaacccaatccctgcctcaacctaggacccttcacttccactcaccgctgctttgggggcttcgacacctcagctagcctgcgacaggcctcctccagctgagccagcgtgttgggtggggtcaggggaggcatcgcagggtcctgggtgaacaggtgggcacggggggtggtgcgggggtgcccgctgttgcccccccacagatggtgccggctggctcgttcgcctggagacgagcgggcagactccaaggggtaggccttttttgtgctttgggcactaaacaaggaatgagcagagagaaaacagaaggaaagaaactgggttagaagaactggaaaatgtgacttcaatagaaacttgtctattctgctcagagagagagttaaaaaaaaaactaccataacatgaacaggggtcagtgccaaaacatgacatttttgtggtctgctcagtccaacgtttaatattaagatggcaggagcaaatagtcacatttgtattccgcggactgcaaaaacagccattcccacaatacctccgtactgagtgcccatgaccctcgcggccgcggcggcggcaagcggtgtttacctatggggcttgggcttgctctgccgctcactctccagcatccactgccagacatcctgcgacctgtctccttcctcccggggaagctgcagggccccagctccgccgggggcccctccttccctggcgggcagggccaggcccggctccgtgcctttcccattgcgtttgggcaaggtactgcctctgctgccgctgtggggaaccaagaaccacacccaacccagagacccggttaaatctccgggactcctagaatcagacaattcagcaagtcggggggctggtgacacgaaagacccatgcacctgctccccgcaccctcacccggccgtgcactctgccgccctcttagaaactaaatgcctgtaatgcggctcccacctcacacctgcccatggacctggctgggagacaagccccacacgggacactgcggtccgcccggcacttacccaaactgctcgctgggcatggtttccggagccttggagtggcttttgcatttcgagtagcagtaatactcgctgcccccagggcagaagcagtgcacccgctgcgtggcctccgcctcgatctcctccttggtcttggggacggcatggtggtggatgtagtggtggtggacatgcttcgtcgtctgcttggtcacaaagcctttgcccccgaggagggggcaggcgcccggcgaggcggccgcgggaggcagcttgccaccgggcgggagcagggagtggtactgcgaatggtggtggtggtggtggtccggggagcgggagcgggggctatagcggcctacgcctggagactggcagccaggggtcttgaggaccctggacaggtgatcgtccagtatcgtctgcgggtcttcctcgtagctgccggagggcagtagggagagggggtgctgcgtgggcgccccctcccgcgaattgagtgtgagctcggagccctctctctcttcatcctgaaagggaagacgtcagaaggagaagtgacccaggaagcagaagggccagaggccctggggttgcaacattcggctccctacgcaggagcacgcacacccgtgtgcacgcccacagccacgcccatgcgcacacgcacaggcccgcctacacaagcacatatccacacgcatatgcacacccacacgcaacccatgcacatgcgcacacagcccacgcccaggcacacacccacacgcagcccacgcgcatgcgcatgcaacccacgcacatgcgcacaccctaacgcaccccatgcacatgcgcatacacatacgagcgctcacgccgtggacggaagcaggaagaaggcctaggccgcattacctctcggatctgctgcaggcgctcctccaggctgtggcggctctccaactccagcttcagcttttccagcctcgagatcagctcagctgcaaaggtggcgggttccacgggggtcatctccttgggcaggcggtgggttctctacaggacgtggaaaggaaagggaggaggcacgttcagcaggctaggtgggcggtggcttggccggagcttcccgcaccaggcgctgtgcaccgcaaacccatgttcgggtgtagagtggatggcaaggcggcctgggctgctcgggacttttatgcgctagcgccatggcctcatggagagccatggtccccaccagcgtttgccttgggcaggagcagttggtcgcactccgagaggccctgcttgttctttctgtagtacaaccagcccatcagtagttactttgaagtagaaaatcttcaaagactgttgtcaaccatcaaaaaaaaaaaaaaaaaaaaaaaaaaaaaaaaaaaaaaggcagccctctgaggtggggaggggagagaccaactcaaggaatagaaagtagaatctaaacagaaagagagttgaaaatttaaaaaaataagattggaaaggaggtgggaggaaagaaagtgggggaaaagggagtcaaacggcctggatcagagaagaagtggtaatttatttcctggccgcacactgcgcacctttgaggtggtggtgtctcaacactgtcctcgatctccctcgtttttctccttccctcctccctctctctttgtacagaaaatgaagaaagctgctgcaggctagtagcagaacactgctgagcttggctgcctgaagctgatctatcaagggaaaagggaacatctccaaatcaagtgcagaatataaaaaggcaccgagtacgcctgccaaaagcagcaaacagagagaacccctgctgcccagctttctgtccttttcctgtcatctcgctccccccacccaaccccccacctctccagttgttctacctccttcttcctaatctccctcttgcttagctcctttctttgggctggggtgggggtagcagaaagctaacttgcaaaggctagcatctcccccagctgaaaagatgggccttgccacggcaaccacttagctgcagaaactggggaagaagagaaaggctcctgtgtaggtggccattctcacacaggctggctccttgcagcccctgatcaaagcgctgcctgatggagaaagtcgatttgcacaccccaggacaaaatcatctaatttacaagcttgggcgatagaacttttctttgttaactcacatatcccccagtcaaaaaaacaatgatagtatgtcatcaatacttgttatctgtagagggaggggatgctagaggtcctcagaaaagcaattttaatatgctaattttaaaacaaggtaagtctgcccttgtctgtgtgaggagctttcagagaagagctatagtttgtgcactaatgcaacatgggtttagcaattcaatgtgttaattttttaaacacaacataaccagaccaattagattctctgaagctggcaggaaggattcataaacacctgctgtgagctgggtgctttcttcccctcccctccttgcaacctggatctgaggctgttgtaaacagcacagccctaaaatgggaatgtagatggggaagttctcttgagtacagccatgtgctggctgctttagcaagcatggaaataaaagcagaggtcccagaagagcccttcatccaccatctcagtcacaggaagaagctgctcaggagatcctcacttctaaacacttcgttcattccgcatttgataggcacagactcaccagcaggtaccaagccaagttctggagttggaaaggaacagctaccctccagggcttcaggagccaggaggagaaatggtcaatgaatacataaataaatgactaaaatcactgactaaaatgacttggagtcctgtggttgacacaagaagtagaatgtcccagtgaagagagcaggaggatgtcccaagggggggcagaggttccttattcattcactcaaatgtttattgagcacctattatgtgtcaggtactgttctagtctctgtgcatacagaggttaacagaatagataaaactccctcccatcagagggcttccattctagtggaaatacagtgagctcaccaagctgtagagaagcatggatcatctagcatttcttagtttctgggaaataagtgcttcagtttctttctgatagggaattttttttttgaattcagaaaatgcaaaggttcaaaaataggtcatcaaacctctcacatagttgggatgcttgtcccctccaaatctcatgttgaaatatgatccccaatggtggaagtgcacctagtgggaggtgtttcgtgccctccctgcagtaatgagcaagttttccctgtagttcatatgagatctggttgtttgaaagaacatggcattgcccaccacccccccaacctcagcttgctgtttctcccgctatgttacaaactggctctccttccccttgcgcatcatgattgaaagctccctgagaccttcaccagaagcagatgttggcgccatggttcttgaatagcctgcagatccatgaaccaaataaacctcttttctttgttttttcttttgagaaggagtctcgctctgtcgcccaggctggagtgcactggcgttagctcactacaacctccacctcccaggttcaagtgattcccctgcctcaggctcccaagtagctgggactacaggcgcacgtcaccacgctaggctaatttttgtatttttagtagtggtggggcttcaccatgttggccaggctgggtctcgaactcctgacctcaggtgatctgcccacctccgactcccaaagtgctgagattacaggcatgagccactgtgcccagccgtaaacctcttctttttataaattactcaacctcaggtattcctttatagcaaaactgactgatacctcataatcacatcactgtgctcaccatcacaacccaaaaaaccatgtaatgcctattgtccagttcttttctctccctttgccctaggggaccttaggtactgctcttttctaccttccctatacctctccccattccaccacccatttcttttctttaggactcaacatggcagaaaacagctgtctcctcactccagactgtactcaccgggaaatgaggtagagacacttggccattggccttcacactgcgatgcatttctctctggagctgtttcttactgcccacacgataaggaggaattccatctctaagggaaaggaaaagacagaatccacaggcttacgaggatgttttcagcacatcacatgggctactgtcatatgccatcttgagatcccgccgacagggccacatgcttccataggagtgtcacatgtctccagataccatcggtgctcccacagggaaggacccacccaaggtcaaatttaaatcctgcccatcaatcatctatggaaacttggcttccttggatgcagaagcatcaacttggaaagagcctggaaagttaatctctcggactgttgtcttagaactgggttacactccagccagcccaggcagagcaaaggctcccctattttacaggtgccctaagtaggagattctcaggccccactggtcctcccacttgttcccactgcttcaaaccaggaaccagtgccttatggatagggccagggcagaaagttgtagggataagaaccaaacctacagagggctaaatcaggcattagtgaagcatgcataactctccaagtcaacctcctagtcatttccaaatgtatttctttttataaaccagtacagcgtgattaataaaaagaatatataacatttaggccccttctctcagctccaaaccctaccacccccaaccaatgaattttcaaagacacatgaccaatgtgggcatgaagagaaaagcccctactatgtggtggtctgtgcaatccatttaaagattagcacctactatgtgccagatcttctcctaggcactaggcaagagagcagtagacaaagtggatacataattcaaacaactgccctcttgaagtttacattctaatggggaggcacaggcaatgaacaaaataaaaaatagtatgttagtgatatgtactatgaataaatacacagcaggaaaaggagaatcactggtgagtgggtaagctgcaaatttaaattggatgtgggtgtcaagtcctcattgagaaagggacctttgggcaaagacctgaagaagtatgggcccctatccattatatttttaaaaacaaaacattaacaagtagaagaatttttaaaaagctgccactccagctagtgttcactacaactatgacctagagttgccatgattttttccagaaagaatttccttcttaaaagcagaatggtcaaggtgtgactattttcccattgatgtcccttcaggaggccacttatttacaaaagcctcagggtgcaaacattttcataatgaatcatacttggaggctgtaaatattgaaattgggtgtttggctacttccctttccccaatgtctggttcatcatagggtggaagaaaaataggataattagcaatgtctaaaaatacccagggggcaagccaggagtaactagtcaacctctagctccttatctgaaatgccctagaattctaaatagctgcattttcaggaagtctactgacctaggtcagaaaacaggaacacaagggacaatgaagattccaatagatcaacaaaccaatgtatgttaaccaaaccctggctaaggagtgcataaacgataattgcactgaggtgagtagggaagggagagaagagagatcagtatccagagcaacaacttacccccaagtgtgagtactgccccaaagaaaggtaagtatggagcagagacagagcactgtgggaaggattcgcagcagctggctgaccagtgctggagaaacacgtcttctactcatgactgagaaacagcctcctactcatgaggctcggcacctgaccaagcccacctaaagattatttatcaaaactctgtgtcttcaccttgggtagctgaaaacgggacttataagcatgcctggcttgaccagaaaccaaatcgcacccaaggcaactgatgccaacctgagaatgccagctcatagataccgagtccctactgtacgtcagacattggacctataatcagacttcattctcataagaaccttaatgagccacattttacagatgaccagaaatgctcaatagctcacctagtgttacagtcagtagcagattgacaactcatacccaagccactgctggactccagaacaggcatctgtaacaacctacacttggtcatttcaataagatgcccttcccagccccaatcagcagtcaagcttcctgatggtcttaatgtggagatgccatttcctaagccccacgcagtcacctgacattgataaggcatgagggggaaatttgtggaattttctgggaagtcctccccaaccacctagtactcactagctatggggctcgccaggtggttcccaagccatgctgaatatccccatctctcacctaagataccttgtatggtaggggtggcggtatcccacagattgggctcatgctggtctaaccaaattctgctgccctagggctgtaagacaatgtctatcctccatctctcttctagggacttagacagtggatgactctgcttcagccctgttcctgacagtcttgggggcaggagtcaagcactccatggaccccaccatgacacaagtgacataaggcttcaagagtcctagaagagtcccccgtccaccccctccaagactcttgacatttccactggtagctttcactcttccttctcccagatgaaagtcagtggtagagcttttatgcctctttttcttcttccatataataaggttaaaaaaaaaaaacaggatgggggtagggatggggaggggagtagataactgcaatattgaaggcaaaaggaacaaatgatttcataagcacctcataccccgccccccatcccccaccaccaccaccacacacactccattacccagggcaggtgaaggactaaactgctggaaaggcaacttgtaaccagagcagaaaaggaagatgtcagcctgtagaggctcagaaaggcttaacaggcaccttcaaggaaatgtggctttaattccctccagccaagaatcttcttccaaaacagcccctcattccaaaagggggcctctcttcttttattcaagctctaaaagtctgtgatcagtttcctggctgctcaagcctgtgggctggagagcaccagagttgtggtccctatacggtctcctttaattataaacattttagttaacgagcctgctgccgggcccagctgtttctggggagcatggttttgaagtgtggactccacttagctgccatttgagccgagccaattagcttagccttttgactccaccgtgcccgacctaacctgaatgtcattttctggcgactttgaaatagcagactcatgcacacatgcgtccactcgcatcttcatttggcaaccactctgaaggcagcctctgatcacagccaacatcaaaagcctggtttgtaggaaaaggttagtatttgaagttcactcagatgcatttcctggtgtccaaagtaaacccccataaataagatataaagaaatacaaataaataactcgcgacattccctgtgtgaaacaccaaaaaatcatcttgtgctgatttggggacactcagagctgaagcaacatacaaacgtagctgatcctgattacaagagcaactcctagcagaaagaagagacaaaggcctccacaccactgacttagctttcatgattcctggcaacatctaaccatggctacacttgggcggcaaagagtctgctgcttctgacattttcaccctctttactccatccttctaagcctgatgccctggaatggcccacaagccttctgcctccagtgctgcaaggattttggtgggagtctggcagttaacgttaaaaaaattttttttggcaggttgtggtggctcacgcctgtaatcccaccactttaggaggccgaggtgggtgggtcacgaagtcaagagatcgagaccatcctggccaacatggtgaagccccgtctcaactaaaaatagaaaaattagctgggcgtggtggtgcacgcctgtagtcccagctacccaggaggcggaggttccagtgagccaagatcgcgccactgcactccagcctggcaacagagtgagactctgtctcaaaaaaaaattaagccatttcttccgagaatgcaggtttcagagtaacaggctcataaaacagccttctcagaggcccaaatgcccagccatctttaacaggactttttacttagcaggaaaacagaagtcagcagtaggctttgggagaaggcaatgatttctttaaagcccctgcctgctctgcacactcaggccccggcatgtggctccctggaataaccaaccaagtgcaggccagcactgccccaacttctacccaggcctcttgcaaaggcccccaggacttaattggttctgtcgcaaatgagacgattgctttcctgggtttgtgtctaatgaactccaaccttctggagtctattgaaggctgcctgtgaccccctctctccctctccccccctccccagccctgttccctccccagctcccagcagggcagccagcccccctccccagcccctcacagcccgcactggccattgtgacgggagaaacagccagggctcttttcatgctttatggggcgctcctattcacttgttcaaggaaatttcaaaggggcctgctaccctcttatcccctctaagcttcccgggatgaacaatgggctgaaagcgattcagttcagcttttcatcccccacacactttatttctcgcccggcgctctcatctgcacgaggcctacaattggcagagttctgaagaggaggtctgatcccagccctgggaatcccgggtgaccgcccggtgctgggcaggatcacacacacccagggccagtcggccagagaacacattgcatcgccaagtctgcttgcagcagagtggggagggccccagagacccccatgcctggcacccaatggcagcttgagtcagtgccaacaagtctggagacccttctgatgttttctagtgagccccactagaggcagcatgagacaatgcccaagagacagtgaccccacatggatgccaaatgcactcctaattagtataaatgcccaggtgggcacaactgtgacagttaatctgataacctgcgcacttgattgggagagggcacagagccactcaacaccaccaggacgaacagagccaacaccatgagcccacgggtctctaggccttgcagcacttcctcctggcttcctggtttattcactatccatccaaggcagctttgccacaggataggcttattaatactcacaggttctgccaccaggaacccaaaggtatctactgtgccccaaagagaaagccgctacatgagggacttgacctgttctgtctctgtatccaagtggacctcactgaactacacactaacccttgccacctagaatagggactggcaaaggtaacctttctgatccctgaaaagtggctcccccatgcttggaatccaaagtgcttcagctaaagggggaagggtgaaagctttaaagtcacctctaaataaaagaaagtttttcttctgggaaggggataaaagaagaggaagtaaatggggaggctgcaggggagaacttagaacctgctcccttctacccctcccagaaccagtctttctaaaaagcagtcttgattactaagaaatataaataaaagaaacccaaagtggctcaaaggtctcatgaccaaccggtcctattcacagatctcatgttgagaacgctcatgcctgggggaagggcaaagcgggcaaagtacagggcctgtgtctggcctggacctgaagtctgtctcagaggtgcatggctgtggaagcaccaggccttatttcctcatctgtaaagtcccaagtatctgcctgcctgccttcctgattgggtcttgggaggatcaaacagaaataagtatgggactacacccaagttatctcatcatgaacccagaataacacctcaatgatggggactgacatgcagccaaggaccaggaagcaagccaaaaatagtctctaagaaaactaaacagaagtcttatcgtctgacgtaaactgcatttgacttaggagattcactcaatgccttcaatcaatttcaacttactcttattttacacataatgctaagattcccacacaatccacaaagtaatatatgctacaggaggaatgcttgctagaagcaagcacacagacagcaaaacacaacagcagggagaatgaaaagagaaaagagaaacttttcaaaggggaaagggtcagataaccctatgcaccctcattgcctatgagagaaataccacaacaaagtacacaaacagatcttgatattatttggataactgagagataaattatgccctgtctaatactatgcaataatgacagagcaaaatgtattctaagaaatatgtccaccaaaaaattatcaaagcacaattttttcaagtatggataccgaaatttcagtcaatatggaaaactcacttctgtgaaacttctcatatctccatattggatgaaagatgtgtactttcctgtttccatattggatgaaagacgtgtactaatgccaaaatgctatttttattaaaattcaaactttcaccttgaggatatctctccctgtactaacaagggaatttgaggtaacacaataaaagccaccagcaaaataaatagtaggttcccaaactcacctcatcaactttccctccaactggtcccatgccacaggccaggcaacaggacattggccagtaaaaaccagatagtttcaaacaaactggaataatagatggtccagttttaggaagctaaaaggaacaaactctaaataagtgtgccagaacttacacggttcaatgggtttgcctttcaaaattgttcctttagcaggcgaaattctgactccaaaacattgaaaagctttcaagaccatttctggaacaatgaatctcaaccgggtgttgggtgagaagcctttggggaattttacccatcccctatccccaggctccactctgggtctcctgaaccaaaacctcaaaggacagccggagacagggatacccaggccacagctacacatccctcctcatgagactcactgaggatcactgctgtccatccacagagattgccatgacttgacttcaaatgacctaaaattcaaaatgttaccttgactaagggccttctgacctcatcggaccacgccaatgtcttgggttactttcaaaaatcaaaggctgtctgccaaagatccagatcagacactactttggagagagcccctacttagggtcctcagtatctaacacagagtatctaacactccacccacacttactgaataaacgatgtccatttaaaaacaaaacaatgcggaacattacacactgtggctctttagagatttctggctttctcacccccacttgcaatgccttttcctccaaaaacaatgaatacctaaacacagacccttctaatgccaccttgtctcccagctgttggttctgcagacaggatacctgggtttctggaccagccaagcaactgttcccacagggacaaccagatgatgacaaccagaagaaggttttttaaactcaaggaatctataaatattcattcatcctaatcttctactgtcctttagtttttcttctgttacaatatcctcccaactttcaaagctctaagctttaccctacccagatgaccatgtcatcctccttaatcagcaccatacccttgtcatactcccctcccaccaaactgatgtccatacatgcacaggtgcggtctgcaaagccagctgaggatgacagacgattctggctaagtgctcaggtggcatccactcccaagcaagcccacggaagggtggccaggatactcacacactgctgtccgtcatggacatggaatcatccgtcagcgcatcactggatatctcactgtcgttggcgctggtggctggtgcaaagacatagccagaacctatgtgataaggattaacaggatcgctcctcttgaaggacctatgggcaaagtacaaaagtggttcagtcactgaccctcaccagaaacccaggtaatcaggtgaccccaggacaacccagcacactatcccacaatctgctcaacgccaacctgctgcccaggtccagttgctcacctgggcagaaagcaggggccacaaaagggaggcctcctgagccaccggttcaccctggggaaagcaagctggttcctctgcccccagtggtgggtctgccagggcagagagtattccagaggcagcccaggggatcctgtgaagctctaaatgcacttagaggaaggaactggactctgctttaggagaggaggccatggaatagaagaggggaacgagtcagtgaagatgaaatatctttctctgctccacctccctatccaatcctgcaccaaagaatacaatttcagggccccaagacatcttaagtacctaaactccttgtctggggtctgttagcccagtccagagatgcaaacagctagaggccagtgtggccttctcactttgaccctgggcccacagtgagctggacagacgggacagaaaagttcaagacaacgttcaggactccaatcccacctgtgagctctgccatgagccgttgccatgccccttcccccaacccccagcttcctctccccaggactggctagtgcagcaggattgaaatgagcaacacagctgtttcaaaggaaggcccaggcccctcctccggtatctccagcccttttgtttcaatggcctctggctcctaatttcaccctcctgatctccttccagaacaaccagtgtgcacatctcctgctgggccgcattcctcttgtgtcaccagtgaggggcttaagtagcggggaggggcagataggtcggcaggctgcacgttaaggcctgaagtcgcaggaggcctatttacaaagaccctggcatcctccactggtcccaccaagtctatgccagcagcaaagaaatcaagtgagggagaaaagaaaggctcagaaaagagaatatattctattagtccacagcagctggtctgtaaagatggccgtggggttggcaaatgaaaaggacccagaaaggtgacagtcagctgtctgcacatgttcaccaagctcctactcacttgctacatgctgaactctggtcttccagcacccatggcctggtgggggcatgtcaccatactgtgggggtgtcatgagggaggtacgctcagtgttatcacaggctcacgaggaggggagaaggagcactggactgtgcccattctacagatgaggcccttggagtccagaattccagcagcctgcccagatcacacagctggaactggtgggcatggattgagtcacgtggctctcaatcaaactgcctcccaatacaaagactagactcaacatgtttccaagttctcacagaataaaaagcaggaaaggagtgccttagtacaggtaacccagatgacggatagaacatttctaggagggacagttggggacggctccctgggacagatgggactgatgggactaatgggactaacgggactccctgggacagatggcagatgggactcatggttgagcaggaatttgaggagatgacaacccaggactaggtaaagggaaaaaagggaaaggtagcgaaaagctctccctagactagggagagagaggggtctaattagccaggctaagaaggcctggcaagggacgtaggtcttcagtgcaaggtcatagtcctgtcttaactggatggggaggggccaggaggccaggggacagcaggggtgccaggggaccggcagggagaaagcattcccatcagcacataggatccaaggtctgtcaccagactggatggaaaggaggggtaggtacaggcagggagccctgggggaagccaccgccacaatttggtgtgagggtctgtctcaacaggggatggtgggatggaaaagaaggtaggagaggcagtctctgcctttaaggagtttgcgcttgttggagtcaccaaacacacacaaaaagttacagggccataaactttttaagccagaagggacccctgtaatcatcacaaccacccaaggaggtaacttagcaccatgtgggccaaaggccttgtcagacttggccagaggagccggaccacagctgtgccctggatcctgtccgactgcatcaagtcagatcttagaaatatgctgtaggcatagaactgaccagaaggtgcagaccaggagcactgcacatgaacccctcaacacttttgaccaagtgacttgtgaccgtcacttggacactctgaccctgttctcatatctgtagagggcaagaagtctcacgacctcctgggatttttttggtgaaaattaaatgagaacggtaagatcttccaggccttcctcctggtccatgtgtcctcaatccggaattccccaacaccaagggcagagaggagtggtgagagtaaaaagaacagttcattcttctggagaagagaaggttgattcagtgaaaaaggcctcgtagttgagaagggggactctctgttcagcatccccactaaaggaagaacaaggggaaatagacttcaaaagttagagagaaaaaaatacttctaaatggtcagaggaaatccataaagtaggtggggacaggctgtgaaatcacccaagtctttaaaacaggccaaagtgcccagccatctgggtgcgtaagtaaggcgtggatactgccttgaagcaggatgcacacgatgacttccttggggccttttcctgttgttaggaatccagtgatgaggccacattctgtaaactctcagtagggaccagaagtcagaggctgggcactgctgccggcttggctgcagtgctcactgctgggctgagtcacaacccctccagaggtgggcacccacctgaagagcaggcagttggatcatggcctctgcaccaagttctgaggtcctccaaatgaaccaacaaaggcacagtaatttgggggaaatcacaggaaaattccaagaaaaaaccgagtgccaacaaaaacagagagccccagccaggcacggtgacccacgcctataatcccagcactttgggaggccgagatgggtggatcacctgaggtcgggagttcaagaccagcctgaccaacatggagaaaccccgtctctactaaaaatacaaaactagccgggcgtggtggcgcgtgcttgtaatcccagctactcgggaggctgaggcaggagaatcgcttgaacccgggaggcaaaggttgtggtgagcagagatcacaccattgcactccagcctaggcaacaagaatgaaactccatctcaaaaaaaacaaaaacaaaaacaaaaaaccagagagctcccattttctcaactgccctaatttccttcatcatctttatcatgatctataatgactggacactggtgtttccatgttgaacacctgtcctgtgaaaccagactgtaagctccatgagggacagccctgtcctcacacgaatctccgacgctgaaagtagtgagtggcacgtggcagtgactgaaaaccttgctgactctccttaaaggacctaagaccattagatgggtcactggaaaagttttttagtttaacaggcatggtgcaacaccaaaaaagccaaaacagccttaaatagcattcaaacactctttcttccatgccttcagtcctgctatcttggtggtattaacacatcaaccatgtctccactgtaagagctatacttcaacctctgtggggagaaaatgactcaatagaaaattccttcctcccagcaaaaaagacacctaactcaaaccctatgtgtgctcacacggctttgcactcgttgtttaacacatggatcccaaaataaacttgtctcccttcacttccaacatagaggactactgtgtgaccagtaattaaaaatggaatatactgctcttaactcagttgactgcaataaagtacttggattttcccacaatcataacaagacagggcagagaaaggaggcagggttgtggggagaggcagagactcggtatttcagaacccagacctttgtcaaaagtgccacataattttaagaaaacggagtggggctgttttcttgtgattacttaaaaaaaaaggcggggggggggggaggaaactcaaaccacgctacagtaattgtacccagatgctttatttcctcaggactgttgtgcttccagttgctgcaaggattttaaattcctacacagagtagaggcctatgctgcagcttctgcatcagcctcacatccacagacctggtttgcaacctcagtaagcaaagggttttcagcctgcaggtggcagagacccccggaaccttcagggaaaggaggtgccggctgctttctgttttcccctatcctgttcttatctcctcttaatgagatgctgtggccctgcccctccccataaaccagaggggagcctccaggcagggagcacagaactgacctgacagaactgaccataggggtcctcctccttctcctcctcttcctcttcctcctcctcctcctcacgttcccttctcaaaacaatgcaacttcaaaagtatatgcttctaagtctgtgcgttcagggctttccaagagccctctgaaaatttactcacaaggtcactgcccaaaaggcaataccctcttcaacaagcattttctaaggcaagatcaagggacactcggcaaggggccaggactccaacagcactgggcaacgggaccttttgaaaacaggcaaacttttacaagtggatcttagcaaactgccctcaccagagcttccatcctctaattgtggactactgcttccagcatatctttcctatggcatcattttctttgataattgaagccaagcttgattccaatggctccgcacaaaaacgggcctcatcagcgagttctttcagagaactggaagcagcactcggagccagcagagggccatctgctgggcccgacttcttttaagggaggccagagcagagggcccaatgggaggcagatgagccccaccttgggcaggacacacaagggcccgtgcagaaaggcgaggacacagggagggctctgtgcacccagcaccttattctcctccccaaaataaatgctgggcccagtgcccaatcccacaaccccccttcgcacacacctcgacactgtgcgtgtgtgtgtctgtgtgccggggattttacacgtgctcctaccaacaagttgcttttgctctaggttatttatagccattgtcaaaagcccaggcatccccctcaaccactcagaccagagtcctgccctctgaggataattcctgctcttccgccccaactatttatattaaacctgacaccaaatcagtaaggacacaaacaagtcgttaaaaacgaggctcctttgagtgcccgaggtaaacacagggcttgcaagcctggccagtgccccaggcatccggctgccaagaccgctcctcagcagctgatgaagaaagaccatcctcagcagcactgacgtttctgttccattcattttactaacttattaagcccatcccagatgccaggtactctgcagaatgagtgagtgtgcgggagagggaaggggggaacttaaaccttagatgggatctctacattccaagaactagctggaaaaacagacttcagttcaataagaaagttgaggcatgggggtcagggggccactctaaaaccttacaatggaaaatgggctaagccaagagtcaccctttaaaagtgacatcccaacctggttgtcctatttacatcatcattactaattatactaattataacactttgcggcggttcaaaacgtttctctctacaaaaggctttcatgtttattattttggtcctaataacaatcctatgacacagacagaaggaatggtgcccacccattttacagatgggcacatgccattcagaaaggcttcaacacccaagcagtaagtggtggaccgggctggaatgcaagcctttgaataaggagtcagcagacctttccatacactgtgcacacactcgaatatcttgcacgttaaaatgatgtgagatcatctggctatgtcttaaattctctttaaatatgcccagttaagacatatgagcttcagagagtcctttaagatgcttcatctcaacccaacagtgggagaaggcacacgtgaatctcgtatggaaactctcaggtcaatgacaagctgtcacctctttatcagtgatgtccacggttcacagccaagaaggcagccctggaaaacaggagcttctgtccctgccttctggatctcaaaagcttcatgagttgcatcctggtaatatcccagatgaggcaagcccaggctgagtcgcaactgcccacccacaaaggggagggttcacagcagagccctgcctggggagggcgtccaaaaccacacactgtgctatttacgaaggtgacactctggtcccggcagtgggagacacagaagccccagtcaggaggcccctggagaagcagcctttaccacggctcttaagtagtctcagctctggctgccaggctagagggcaaggaggccagcgccagaggcttacccaaatggtctcataatggggcgggcaggcgtagcaggtgcccggcgactgacctactgcagaggccagacccaggatcttcctcccagacaacttgactccacaagcataaagacactgaaacacctccctggaacctgtgtttccttgcaaaagtcaacctggttccacttaggtgtagaccagatgtctgagtaaaactggttcccaagccacaagcgcgccccctggtggttggagaacaagcccttcctctcctcgccaacagtcaactctctctgccgcccctaaaatcatggcccgctaggctcagacctggccaccctgagaggctcaagatcaaccatctggtgcccacctctcttcctgctgctgggcactagagaccacatcctacagagaaagggaaatccagaggcagctatcagaccgcatcctgggcccctaacacacagagaaattcacacagagagcaagataaatcattcagagagcagtcaagtgcagccccatcccctgcctgtcataaaaccacaccccggaattaagaggctcattctcttttcggatatttggaagtcgggaggaggggagaaaacagaaaaactcattctaacaagaggtctgaagttgcctccaaaggtcaagaatcttaagacttggccattctgcaaagaactatttgtctttgaagcctcaaagagaaagtactccagggccccagtactcccgggccaagatctcttctccatcagcactaacaaaataatcaactgaagtctgaccctcggactcatgagcatttaaaacctggattaatatgccagcaagctctaaaggtaagggtccttcatttgggaaagtcacaggaccttccctagttagaggcctttcttgctgggtaaatatctaattctacaaagggaaccacaagctcagttaagccaattgctggctcttatcttaacagaaaagttcaaaaaaaaatcccacttacccctcaatgggtgcacatattatttcctgtgcctccaccacaacccagctgcctccctagccacattaattccaccctctactgattagtggtgaagtgaccccttccaaaaccggcgcttagtggatctggtgactcagaggcatcaaaagctgctgtcctctctctctctctcaacctcttctgagacactagcccgggataataagtaacccacattagtgaatactgcttgccactgtttgaagtcagcactggaagactgcaggtatttactgtatgtgcatcgctttccccctgtttcaacaacaaaaagcaagatcaaaaagggttcatggccagcagtcctaactcaacagacctgtcagtctctgcagcacacccatccacccatccaccatacttaaaacatctgcaaagtccacagcatcagcccacccgcccccgtcaaagtcttacctgtatccactgtcaacagtttccgtggacctcacactcgccgtggccctcagagttttgctggacaagccaaccacggttggcgaaagtttgcacttgaagtcggcacaagtccactcctcttcttcattcaaggtggggagatagccacacacgacctttaggctcccgagtcccccattactcatgtaagctgtgttttctcccccactcctcacatattcgaggtatatatcagaagtcaaaaacatctggtaggcattttcctccatcaccgactggatctcggtctgcgcctggtcaaacatgatggaatcaatctgctgcttcttgatgccatctcttatgtaggtcttggtggcaggcttcagctgcttggagacaatgctgttgttctcaatgtaccttttgtagatcgctttggctactcgtaaagttttggtatccttcaggttcatctgcctgaatccattgcaggcaaaccagaagtctaaggtatccacgcatttctccctctccaggaaagttcggaacaggtaagcaccgtcttgatcgcccaataaggagtgtaaggacttggtccaccgggtcagaggggaatccggagatgcccgcccctccggctcccccaacccatcttcgttccgcctggtgttggaagagacaggcatgggtttggtgacctggcccttgcccacccctggctgacacggtggggtctccccttcttcccctggcactgggggccgcggggcatcctcacggaagctgctgctggggtccgggaggcaagtcaccaacatagcgctactcatggtgagggagctcttcccactgagtctgggaatttttcttcttccagttcctctcagcaatcggcgtggtctctctgtctctctcaagtcagcaggggctcatctgaacctcctctctggaaagaaaaggaaggggggaggtggggagagagaaaagggtattgatctaatcaaaaccagatctacccaacatcaaagcaagaaagtaaacaggcttttcaactcctcaaattcaaatcaagcaacccagctatctgcgaggtgctcatctaaagtatcaggcgctgcttttcaaaagcgaaatctgagctccctgcacacttttcggggttgggggtgggagggagctgttgggaaagaggcggggaaggtgagaggaaggcaagagctggggacggcagggggacactggaggtgtaagacacaaccttccaaaaacccactcggccagggcgcacgcagggcagctcagcccgcgcctcgccttccctcccttcccctcccccgataccatcaactccaaaaaggcgcactcccagccgctaggctgtgtgcaggtgaaaccaatttcggtatatttccccactcggccctgcacagataactcgagctccaaacgtgcccttccccggcatctggttcccattctccccacccaccccctccctctgcgctccctcttcccactccttaaaaattcagaagatcctggcccaagagaagcccgcccagcataggcggattgggctcccggactcccagattcagcacgcaaacaccccctccccaactcagatttgagtgttcgctacgcgccccctacccccaccaagaatccagctcagtcaacacctctgtcttccctgacctccccccaaaccagaaaccaactcactcaggggagactttcatcttcaaactttgagagagagctgagaagcctcggaaccgtcgcccccgtgcccccaacccacctcccggatccgcgaaacctacaaaactggatcaccagccgtctcacgccactactgcctgtgccaagaatcccaaactctactgatttcaagcctgtcttttttccaaagaaaaaagtcttatctaaccaataaacaagctgctttccctagcacggaaaagatcaaactaagaagggtaggggctgaacggggtgcaaccccgggcgagaagccagggaccccggatctgggatgggtgcacgctgaacccgaccagagcctcgagccgcggggctgggcggcgcggcccacggagaagtggggctgccgttggcaccgcgctacccgggcggtgggaggtggagcggccccgttacctggaagacgaaggccgccgaagccaggctctcatgtcctccgagcccctccggcccggtcccccggcccaaatgcaactgaacgcctccagagccctggcgggcacacctcgaggccggaaccccgggacacgccagcagcgccccgagcccgggcggggggtcggtccccggcgccgccgtttgcagaggcgcccgcagaaaaagcacagaaagcagcagcctagtccagaaatggcgacgcgcggagtctctgcctctccgcaaaaggggccggggcggccacgggcgaggggcccgggccgggaggagggacgcgagggacacgggcgccccggacttgggccggtcctgcgcgcagactgagcctccgccagcgctgtgggccccttagcgcggacccgcggcagggaggggaaaaggggagggggaagagaagtaggaggagaggatggggcggaggagaggcggggggcgggggagggcaagcggggggcgccgctaccctttcatcccacctcccaaaggcactcccgcgcgcactcacacgccgactcacatccataaccgcgacagcgacgcgacccccggggggtatctgccccctctccgcccccgccactgccgccactcggataagtctcctctctgggccccccgccaacccggtcaccgcgctggggagggggctccggcgcagggcgcgcaaggctgcccggccaagccccccggaacgctgggcgccgggtccgccgctcccctccgcgccggcccctagcgcgccccgaaatagccggcctgccaacttcaaagggccgccccgcacatcaaagcgcgcggtccgcccggccgcctcggcctcggcactcaccattgatccccgcgcgcgctcggcggcgagacctcgcaggcgcccctggcaggggcccggccccggcccccggctcggctcgcggcggcagccccgggcccccccgggccggccgcggcgtcggggaacatggggagtcgtgcggcgggggagggggtgcgggaaacaacaatcccgggttcagagcgaaagccaccggccggggagggggaacggcgcgccccgccgccccttttatgcaaaagatccgagcgggcctccgcccccgcccggcccggctttcaacgcaggtcctgtttccagcagtcactcggcgcaccaaatgtcctccgggcgcttccaacaaaaactgcgctgtggatttaactgtgcacttcaaaggcgcgagccgagcgcacggtcctgaaagggaggtacgcgccggccgcgccccgggccgccccccgcagccccgccaccgctccgcagggccgccccgcccgcgcccccctccaggcccggcctccgcctggccgggccccctcccgccccccgcgcccacgccgcggctcggcgcgacctcgccccctgtaagaggggggctttctttgaagcggctccgctggggccgagcttccacccccaccttttacagcagggccttcggcgggcgcctcggccgccgggcggccccgaaatccatcgctctgaggggttatttttatttcccggctctcgggctgttactgagttgccaggaccttatcaaagcgcagccggctccagccgactcccccgggccaggctcgcggagccagtgatcccgccgcgccaatcacagccgcgctcggccggcccgcgccgcccgccttaaagggacagcgccccgcgcccgccccgccccgccccggcccgcccccgccgcacgctccgctcccgcgttaacccttccccggcctctcctccgccccctgccagccccccgcggccccgagggcattctcagcccgagttctgatttcttcttttaagttctccggcctctttgctcccgcctcctccccctgcctgccctcgctctccccggctctggaatgcaacagtttctggtagcattatggccatcgcaagaactgcaagcaagcagatttttttttttctatcatcaaacgcttttctacctctattcaagtttccctgggaatttgggcttggaggactttataaagggagttccggccctggggttggctggcccgctgtcatagggcggactcgggcccagccgctggaggcgtgtgcatgcctgtgcgcgcttgtgcacgtgcatctgagttcgggtaaatataggactgcagttggtggatgaattgcgtttgtgcatgtgtgaaagtggggtgtgaatccgccagtataggcctgagtgctaacaccagttaggaggcatacctcagtgccctgaagacctaggtccagcttcctaacctgctggccataagaccctcgtagcggcacacattggccatctctcccaaacaactgcatacccgttactcttccaaagtcccctcttctgccatatgttacatattaaaccgataggaatatcttttttcccactccaaacgacaaggcatgcatgccgttttaatgtatcgaaaactcctcaccccattgtcacctttgaatttctcccacatttgcccaaaaacgtttataaggcacacacaaccttctcttctccgttaaaatgagaaaatatgtcacaaacccagagcattgtgtatttattctgctgctgctatagaatgattccttatgttatgagcgaataattaacttttcttccttttaaaaaacaaagggccggggacggtggctcatgcctgtaatcccagcattttgggaggcccatgctggaggatcatctgaggtcaggagttcgagaccagcctgcctaatatggcgaaaccccgtctctactaaaaatacaaaaatcagccgggtgtggtggcacgtgcctgtagtcccagctactcgggaggctgaggcaggagaatcgcttgaacctaggagacgggggtgggggggttgcagtgagccaagatggcaccactgcacgccaggctgggtgacaaagcgagactccctcaaaaaaaaaaaaaaaaaacacacacacacacacacataaaggtgtgaaccaaagagatccaagaagtgaaaggcagagtcctggcctcagagctgtgcaaggctcttactctccaacttaatggatgacgagcccttttaaatgcgagatggcctgtcattaggccttcagaactttaaaacatgcaagaattgtggctctatctaggtatccatagaaaaagagaaggaagaggctgggtgtggtggctcacccgtgtaatcccagcacttcgggaggccaaggcaggcggatcacctgaggtcaggcattcgagaccagcctggccaacatagtgaaaccctgtccctactaaaactacaaatattagccaggcgtggtggggggcgcctgtagtcccagctactcgggaggctgaggcaggagaatcatttaaacacaggaggttaaggttgcagtgagcctgggcgacagagcaagactccatctcaaaaaaaaaaaagaaaagaaaaaaagaggaggaagatccaccacccatgatctgctggaaaggggcaggtggcaggactgtgcgccacctgccctcagcctaagggactgtgacaagggactagaaagctcttagactttctagtctaagactctggactctggctcgtgggtgccatgacaggtggccgctcctccccaaaacctgcctttcggtgcccatggtctgcagctccaggctctcgaccccaggcagccaggttggcataaagacagcagtaccagccctgaaatgtggccctgaagccagccaggaaggccagggaaagagtgtggcccgatgactcatctttgccttaggacaactgctggtgtgaggaaaccagtgggctctaaaagccccggcctgctggtattctggggggtcagtggcccatggaccctcttagccaccagctctgagctggcccagggccaagaacacagccaccacctttggccaccccaggagtgccaagagtaaaactgtcactgtggttccagggagtctttgggccacagagggtgttattactggaacagaaatgtagacagaggggtatggattgccataaaagtgtctaccatataaacaacagtaaagtcacacacacacacacacacacacacacacacacacacacacacacaatgtggggggtgggggagagagaaaaatcaaaacatctaaaatcaaaataaacaatgttcagaaaaaagaggttttcaaaaaggaagtggaaacttggtctttgtgggtggttttcctctcctcccagttgtccccaccgacccgtcactgcctcccccaaccagccctaatcactgtaggctcaactttaaccaaaggactacctcattatcccatggctgcgactgtagcaagaggggactgggactgggactggggacccaggagcaaggcccggtttggtttggatcttctcggtcaataataactgctctgagggccggggtgcagtggctcatgcctgtaatcccagcactttgggaggccaaggcaggtggatcacctgaggttaggagttcgagaccagcctgaccgacatggagaaactccttctctactaaaaatacaaaattagtcaggcatggtggcgcatacctgtaatcccagctacttgagaggcggaggcaggagaatcgcttgaacccaggagacggaggttgtggtgagccgagatcgtgccattgcactccagcctgggcaacaagagcaaactccgtctcaaaaaataaataaataaaaaataactcctctgagagcatggtttccagaacaggtgctcgggtcactttagggcagtgactccctccaccatcacccctggcctgtcccctttcctacagctttatatctggtgggacacttccctcccagcaggaggctgggccaagtactggaaagccctctctctagcctctgggtctctgactacttgttgataatatttctagaggagaatccaaagtcctgtgcttatagcagcccgtttctcaagatagcacgttttccattttccccttgtccctggcagcagcgctatcatgtgacttgttgtaatcctgcacggttgcctggaaactggaaagcaaggtgatggatttctgcacatgctcactcgcccccccgctccacctttaaagaaaaaccctacggaggataaacagtccactttgcctaagtgcagacaagtttaataaagcagagagtgattctttgctggaattatatactgggctgaaatcctagaatcccagaaaacaaggactaagggctccctgggaggcatctggccagatctctgacctttagtcagccccacaaaaaccactgtggaggggaagtcacaccagctgggacttcagaggagctgagacccaggacactgctctctcagattcagtaactttgtcttttattcctttggaaaagtgctgccttagacaatgtacctttgtttggggaggaaggtgaagagagacacaggtaacctttcctaagactggaggttacctaaccacacggagtttccatttgttcacctgtagactggaggaaacctcccctgcaaaggctgttgtgagcctgagcaatacgataaatgcctggcacagagctggacacacaatagaacatggcggttattttcacagagtaagtctgttccctcaatagcctgttacctattctgggaagaaactccctatctccaaagcaaagataccgtccattgggagtgacgatctggggaagaatgaccccaggaggctgaccatagggggcctaaaggagataaaggaggctgtgccctgctaccatctttcaaggatagtcctatgcagaaagaaataagcccaggggccattcaagagttatctagtccaacccttcatttaagaaaccagacaaattggctgggtgtggtggctcacacctgtaatgccagcactttgggaggctgaggtgggcagatcacctgaggttaggagttcgagaccagcctgtccaacatggtgaaaccctgtctctactaaaattacaaaaattagctgagcatggtgatgcatgcctgtaatcccagctactcgggaggctgaggcaggagaatcgcctgaacccgagaggcagaggttgcattgagcggagactgcgccattgcactccagcctgggcaacaagagcgaaactctgtctccaaaaaagaaagaaagaaagaaagaaatcagacaaattaagcaaagagaaagtgagatttccccaggatcactttgcccatatcagagatgagctggaacttctgaggggtcctgactcctggcccagcctctttttcctccacaccatagtgaggagacccagggaggggctggctgagatggagggggtgagaccatctggaggtcttgacttttacaacaggactaatacatacaatctgggatactttcctgaaagaatcacaacagggcttctgtctgaaatccctctaaggcacgcttcatccagcccctacctgtaggtaggttgccttggctctgccagctgggctacccacagcctgatctgggacagtttgacccacgtcttttagagtggcagccatttacatgggcatctccgtggagttgatccacctaaggaggaatggacctacttcctctcccctttgcagaggagggactgggaatgccaaggtggagattttgaagccacaaggggaaaagtaaggtttccctaagaaatcccatcttcaaggccaggtgcagtgactcacacctgtaatcccagcgctttgggagcccaagtaggtggatcagctgatgtcaggagttcaagaccagcctggccaacatggcaaaaccccatctctactgaaaatacaaaaattagcctggtgtggtggcagacacctgtaatcccagctactcgggaggctgaggcaggagaatcatttgaacccaggaggcagaggttgcagtgagccgagatcgtgccactgcactccagcctgggcgacagagtgagactctgcctcaaaagaaaagaaaagaaatcccatcttcagaagtgttgggggaatttatttgttgataaaatatctttttttaatatgaaatttaaaacacagttaaacagtaatttaaaacttcctaattggactgactttcaagtgcttttattatggattgtaaatagagctgcaaactgctgattttttttcagcatctcacccttcgtggtcttcaagtttggcttttaggagttggcctgagcttgtaaccagaggagagcaccgatatacctatattaaaacaaatccagaaagaggttttgctttcttttttctttattattattattttattttatgtatgtatgtatgtatttatttatttttgttttttgagatggagtctcgctgtgtcgcccagactagagtgcagtggcatgatctcgattcactgcaacctccacctcccgggttcaagcaattctcctttctcagcctcccaagcagctgggattacaggcacccgctaccacacccggctaattttttttttttttttgtattttcagtagagatggggtttccccatgttggccctgtgattcccccatcctgaccttgtgatccgcctgccttggcctcccaaaatgctggcattacaggcatgagccaccgcccccggaccagaggttctgttttcttaagtgatcttctccacagtgagagacaccaaaacaaagggcgaggttgggggagaaaacagccccgaaaggtcatttttagaaaaggaactggaaaatagaaaggaatccccctaaagtcgtcacgccaacctgcgacgcgtgttcctaaaccgccccccgtagacatttttctcaccttctgatatcttattttgctcattttaaacaacttctggaaagcaaagtttagctgagcttgaaataagttgccttattcacctctgggcacagtggctcatgcctgtaatcccagtactttgggaggccgaggcgggtggatcacgaggtcagatagagcccatcctggctaatatggtgaaaccccgtctctactaaaaaaaatacaaaaagttagccgggcgtggtggcacgcgcctgtaatcccagctacttggaagggtgagcaggagaatagtttgaactcgggaggtggaggttgcagtgagccgagatggcgtcactgcactccagcctgggggacagagcaagactctgtctcaaaaaaaaaaaaaaagaaacctgggccacatctagactccgccttctccctcaaacgcctccattcattcacccagccctgttgattctgcctctaaaaaaatctcccaccaccacctcctgctctgcaaatccacaactgctatcagggcccttgccagggacagccaaatgttctaatgatgcttcacacctacagtttatagccctaacccctgacccccctcacgcagtgctgcaatggtaaacgctgtgcagtgcagagccacccatgtcattctcctgcttcagatcctccccggctgcacataaccttcaggataaggcccagaaccctatgtgtggtgcacaggtagccggcccaagcccaggcccttttccagctctatttctttttctatctttttttgtttgtttgtttgagatggaggagcctcgctcttgttgcccaggctggaatgcagtggcccaatcttggctcactggaacttccgcctcccaggttgaagtgattctcctgcctcagcctccagagtagctgcgactacaggcgcatgccaccacgtctggctaattttcatatttttagtagagacggggattcaccatgttggctaggctggtcttgatctcctgacctcaggtgatccacccacctcggcctcccaaagtacaggaattacaggcgtgagccaccatgcctggccctccagctgtatttcttgctgacacccccttgtccctaccatatgcatggtggattgcctctccttttcctccctggccgactgccctccctctgccacttcttcagtcctctcccacctcatcccccgagaccgggctagagcccatcctcctacttctgtggcatctggggctcacctctagcaaacactgtggttgatctacttctctgtcccacccactcaaccatgaactctctgaggacagggaccgtgttttgtgatacttgcatcccttgaactagattgtgggaaggagggacctgggcgatatttaatagctggtgaaacctgtgtaccggccaatcagaactgataccagcctagggtctggaacagggtcttggaaaccccctgccagagtcaagccagtagtcgctgtgtcacgaggagctgtggttggcatcctctaagttgggccctaatgatccctgcttcctagttccacaccctgcatacttccctccccttgagcatggatagcatttgactctctcctaataaatagagtatggctgatgtgacagcacatccactccacattaggctatcgaaaggctgcgattccttccttaggtgctttccctagaatcttgaggcatccctgttgagggacccgtgtgacgagggacaagccctgccaccaaccaagtgatctcagaagccgaacgccacctaggcaagccttgacatgatgcaggtccagctgctggcttgctggtagcctcatggaaacctcaaggaggaggcacccggctaagccatgtccagattctggacccacagatgaagatgtatcctctggggaggggagtggtgaaaactgacctgctgatgagacttcgccctgtcagttaacattgctaatggtaagaacccagttgcaagacatacaggttgtgaatcttttctatactttattttttttatgttttctttttctgagacagagtctcgctctgttgcccaggctggagtgcaatgacgtgatctcagctcagtgcaacctctgtacccaggttaaggtgaatctcctgcctcagcctcccgagtagctgggactacaggtgtgcaccaccatgcctggctgatttttgtagttctagtggacacgggggttacaccgtgttggccaggttggtctcaaactcctgaccttgagtgatcggccagcctcagcctcccaaagtgctgggattacaggcgtgaggcaccatacccggcccttttctgtactttatgaaatgacagcacgttgatggtcaatgacgacaagcataagctattggcaataattatcacatatttgggccaagcccagtggctcgcgcctataatcccagcactttgagaggccaaggcaggtggatcacctgaggtcagaagttcgaaaccagcctggccaacatggcaaaaccccatctgtgctaaaaatacaaaataattagctgggaatggtggcaggcgcctgtaatcccagctacttggcaggctgaggcaggagaatcccttgaacccgggaagcagaggttgcagtgagccgagatggtgccaccgcactccagcctgggtgagaaaagccagactccatctaatgaataaataaataaatatcacatatttgaagttcttcaaaggttactggaaatttctattgaaatatatcaaaattctaatagattaagaaagaaatatcaaattattttgagatgttactgagttacaggatagagacatttggtcacactcaaaagcaatatttgctttgccgccacctttttcttcccaaatggaaagaactcactggtctaggaggtaaatgtgaatagtccttgcaagctattgcattcgaattagaggagaggaaatgcatcttccctatggagcgactaggaacctgggagaaaggggctaataagaggatcgtgtgacttaaatgtgatagcaaaattagcggggacatgggctaattctatgcatgatgatggtttttagaaagcagacctcggagtccttgtcattgaatttagatgggaattggtgggggcggggattggcggggattgggggagaggattcctgaatggtgtggctcagaaagactttgaagaaatcttggtatttgatgacccttttaatgacagtgtgccctgggagtatgttctctaaacaaacaaggagaaatggtctacagatcagtatggttgaatgttaatagctttcttagcaaaaacattgctatcacaaacaataaaatgtgtagactggccaggcgcggtggctcacgcctgtaatcccagcactttgggaggctgaggcggcagatcaccaggtcaggagatagagaccatcctggctaacacggtgaaacccttgtctctactaaaaatacaaaaaattagccgggcatggtggcacgtgcctgtagtcccagctaatcgggaggctgaggcaggagaatcgcttgaacctgggagacggaggttgcagtgagccaagaattcgccactgcactccagcctgggcgacagagcgagactccatctcaaaaaaaaaaaaaaaaaaaaaaagtgtagattgagactcacctcctggtaatcatgctcttttggtaaatacttttgctgataacttttgagtatagaaaaagatacaataattattgaaactagaaaatctatcttgatagcttcaatgaatcacccaaacacctaagggatgttgggggaaaaaaaattggtcaggtgcagtggtgcacgcctgtaatctcagcactttgggaagctgaggcagggtggatcgcttgagcccaggaattcaagaccagcctgggcaacatggtgaaaccccatctctataaaaatacaaaaatacaaaaattagctaaggggggcagggggagagagagcatcaggataaatagctaatgcatggtgggcttaatacctaggtgattggttgataggagcagcaaaccaccatggcacacgtttacttatgtaacaaacctgcacatcctgcacatgtatcctggaacttaaaataaaataaaaattagtcaggtgtggtggcgcacatgtgtaatcccagctattcgggtcagggggctgaggtgggaggatcgcttaagtccaggagtttgaggctgcagtgagccgagatcgcaccactgcactccagcctaggaaacagagcgagaccttgtctccctgaaaagtaaaaaaataaagaaaacaaaagaaagaaagaaaaaaagaaaaaattcagtgaaaaacaagtattgagctagcccagcttttcagataaggaagactggagcaagacatcccaccagcttcaacgggtcaagcggagtcaggttaggtgacaaggcaccacccccactgaaacgagtctttctttttgcaaactgccttgttttcaagacgctcaatttgttaaatgcattcatctgtctacctttgtataacttttcacaggaatccattggttcacaaagcagaaaatgatcaagacctggcagcctgacttgggggtcaaaaaatacggtcacaaagagcagagtgcagtgagtaaggggctccatccccaccttctcttctactccaaggtcagagaagagccagagcaatttgtaagagcacagaggtgtgaaaggcaggtgccagacgtggcctgtccagggaaggagggggaggtagggtcgctgtctgcagagtggatactcggagaatgcccttggggacaccctcagctgtagaacagattcccgaggtcaagaccaagaaaggcaccagggccacccaggaagggagtatggggcgccatggggtggcctcgggacttcacccatttccgctcgctcaggcagccacccactttgtgcaggtccagcagctgctccagccgaacttggcttatctgtaacagacctgaccctcccccactccattcccatcccttgaactttgaccttttctccccaacaaaggccacctgctttcctttctctcgctgtccccaggagatgccctgctctgaatttccctgtgaaaaggcatcaacctcaaactctacaagacaatggagggtcttgcatacgcctagggaggcagttgtgcctgggaacatggggctgggccttttcttggggagccacggtggcacgaggaaagcaggcacccaaggcagcgggcactggggccccaaagtggaacccaagagcagggtctctgccctcagcagcccccagtctgggggagggtgggaagaggacaccgataatccccgttttgatatttttttgtgccacatgatcggcaggaaaggtgagacagacacagggcacaggagagttggaggctgtgggcagctgagaacaggaactgcaaagaccccaggcaagaggaagctctgccttttccagaaactcataaaaactgagaaccagggagagcagggagggagaaaggtgaggtggggcagactggcctaggccggcttggcagagcactgtgggccacgggaaagtggtgttttctttatcccaaagtgtctggataagccagggaagtgtggctcaatggttcaacacagaggctctggaaatggacggccccgcctcctatggagagtctgtcattcctctgtgccttggtttccccaagtgtataatggaaggaatggcaatgcctgtctggtgggttgttgggaggattagacgaagaagtgatgcagctgagcgtggtgactcacacctgtaatcccagcattttgtgaggccgaggtgggcagatcacttggggtcaagagttcaagaccagcctggccaacatggtgaaaactcaactctatcaaaaaatacaaaaattagccaggaatggtggcatgtgcctgtagtcccagctactcgggaggctgaggcaggaaaatcgcttgaacggaggaggaggttgcagtgagctactgcactccagtctgggcgacagagtgggaccccgtctcaaaaaaaaaaaagaaaagaaaagaaaagaaaagaagtgatgcagtaaagcagttagaacccccctgatgcccagggaatacctggtaagggttagacatctttagaaaaaaaacaaagagagcaacctggcctagggccctgctcccctggctggggaggccctacaagttattcggctcttaaagatgcccctcccttccctataaagtgggaatgaaatatgacagatttaaggtgaggtttgaatggaaatagtctagccagtacatttagtttctgaaagatgtaagtgctcagctttctggcacaaatggcttcccaaggcccgtaaaggtcttggcgcacatttaatcttttcactgctcattgcaagtcttcagctaggggtagcggctgcagccaggtgacccctggtgagtctccatcagaatgtgcccactcccatgctcaagtcttgctgtgatgacagtggggacttctaggtacttgcaaatggtcacgtgttctttgaattcaggagccctgaaccctgtacagcatcacagcccccagctttgctaggtgcccccatcaccactaccctccaggccttcctctggtgccaaacgctgcattgatgtgttctataatttttttttttttttttttgagatggagtttcgctcttgttgcccaggctggagtgcaatggcgcgatctcagctcactgtgatctctgcctcctggattcaagcaattctcctgcctcagcctccggagtagctgggattacaggcctgtgctaccatgcctggctaatttttgtattttcagtagagatggagtttcaccatgttggccaggctggtcttgaactcctgacctcaggtgatccacctacctcagcctcccaaagtgctgggattataggtatgaaccaccacacccggccttgttctataattcttgttccttctcccaagagctgtaagatgggccccagggggcacccaagaccaggtccaaaggggacaaaggaggggatgcacagaggtaggaagccacagtgaacctctctcgaagtatttgctaccacgtgtctgcatgcagcccgggcgaggctgtttgtattgcatatatgaggtgctgggtttttctttctttcttttttttttttttttgagacggagtctcactgtcgcctaggctggagtgcagtggtgcgatctcggctcactgcaagctccgcctcccgggttcatagcattctcctgcctcagcctccccagtagctgggactacaggtgcccaccaccacggctggctaatttttttgtattttttagtacagacagggttgcaccgtgttagccaggctggtctcgatctcctgaccttgtgatccacctgcctcggcctcctaaagtgctgggattacagggtgctggatgttttctaaaggtgcttgtccagacagcccaaccaacatgaagccatgaaagttgccagggccaagccttccacttgttttgtatccagcaccatgtaatattaagaaacaagtgggctgggcgcggtggctcacacctgtgatcccagcactttgggaggctgaggcgggcagatcacgaggtcaggagatcgagaccatcctggataacacagtgaaactctgtctttactaaaaatacaaaaaaattagccgggtggtggcgggtgcctgtagtcccagctactggggagactgaggcaggaggatggcatgaacctgggaggcagagcttgcagtgagccgagatcgtgccactgcactacagcctgggtgacagagcaatactccgtctcaaaaaaaaaaaagaaaaagaaaaagaaagagacaagtgaggaaattaatgaacaagaagtaacaccacactatggactttggagtcagaaagacaaatcagatttcaaatcctgaccccacactgactagctgagaccttgagtaagttgtacatcctttttaagctttaatatcaccatccataacatggagctaaggataaagacccactttgtgagggtatccttcatccgctgggtgaaatcatctgtgagctatccttttttttttttttttagatggagtttcactcttgttgcccaggctggagtgcaatggtgtgatctcggcttaccgcaacctccgcctcctgggttcaagcaattctcctacctcagcctccccagtagctgggattacaggcatgcgccaccacgcccagctaattttgtatttttagtagagatggggtttctccatgttggtcagactggtctcaaaatcgcgacctcaggtgatccgcccacctcagtctcccaaagtgctgggattacaggcatgagccactgcgcccagccgggctatcctttttcatatgtttcccacctaacaggtccaggatattgtgggtatcaagataatatatgcaagccgggcatggtggctcacgcctgtaatcccagcactttgagaagctgaggcaggtggatcacctgaggtcaggagttcaagaccagcctggctaacatggtgaaccccatctctactaaaaatacaaaaattggccgggtatggtggtgggcacctgtaatccctgctatttgggaggctgaggcaggagaactgtttgaacctgggaggtgggggttgcagtgagcggagatcgcgccattgcactccaggttgggcaacaagagtgaaactccgcctcaaaaagaaaaaacaaaaacaatatatgcaaggtgcccaccacagttgctggcacagagggatcagaacgttttgctggcgttgtggttggtgttagtatcttcttcggaagtgctctaatccaaaaagaccaccttggatacctggccggagtaatcaggctgtcctgtaagaatggctgctaggccaagtcaggcgctcccgtagacccttgcagactggcctggcaccagccacagggaatccactgcccggccctcaaagggaaggtggaccagcaacacagctcagctccttggcgccatcttccctcacaaaagagcggcactgtctgaaccctcagggccaaggagcagtaaaaggccgtaaaggcggagggaggagccgccataaactggaggcagagtccttagcaatttcctttctgataagggcttcaatggtttggaggagacctgctgtgattctctaatctgggctcacgtgccctggatgtttgaatccttgggtcagagtgcacaaagggaagatcaaggaggagaaaccgtcagaggggacaggaaaggacaggagggggcatccgacgaaggccaagaggcaagctacagaaggggccgtggaataacaccaaaagggtggctcgggcgaaggccacttcctgcacgccaggcccctgtgaagggatcacctcattcgctctcccacccaactgagagtgagacggccccccattaccaacctatttttcaggagacccaggttagaggcaggatctgctacatcatgtgcagggtacagtgcaaaatgcaaatgtcggcccccttttgcacaatttgttaggaatttcaagatggcaaccacagaaggttaaagctagtgggcggccttctgagcgcggggccctgtgtgactgcacggatctcatgtccatgaagctggccctgtctagaggggttgagacgcttgacaaaggtcacatgatagtaagaagcggtggctctgatgtaaacacagtgcagtgggataggacaaagccccgggtgggtctttaagttcttcccatcctttctacaagatggacagtgctcagaaagggtaagggagctgttgagggtcacacagctccctgagaggtgggttcttccagtaaggcagggaattcaagatgggccattgtcttggaagatgtcagtctctacttgcttagacaagcaaaacacacacccaaaacacacccaaaccaggacaccagcagcctggaaatgccagacaagaaaatggaagaaaatatataatgaggccaggcatggtggctcatgcctgtaatcccatcactttcacacccaaaacacgcctaaactaggacaccagcagcctggaaataccagacaagaaagtggaagaaaatatataatgaggccaggcatggtggctcacgcccgtaatcccaacacttcaggagactaaggggggcggatcacttcaggtcaggagttcaagaccagcctggccaacagggcgaaactctgtctctactaaaaatacaaaaatgagcagggcctgggggcacacgtctgtagtcacagctactcaggaggctgaggcaggagaattgtttgaacccgggaggcagaggttgcagtgagccgagatcatgccattgcactccagcctgggcaacagagtgagtgagactctgtctcaaaacaaacaaacaaagaaaaatcacaacaacaaaaaaatacatatatatatatatatatatatatatatatatatatatatatatatatggagttgtatagaattgtaagctcattttctgagcgagcacgaacagataggagtgataactttcctggccctacagtcctctagcatttccatccccttagacaccctgctaggacagtggtagtggccagggctggaaggagctgctgcataaatgtcctccaggatggaagtgtggactccaccaccaggaactcacctgccttgggcccagggcacaggtctgcctgtcttgtaccctcttttgcagacaggcgtttccttaaacccctggtcccgtgttagcttttccttctctgagtaacaagcatcagtgttcgtaggcccccaactctgaaggcagctagtccgagctgctgtttttaagagcagagccatcaaactaaagtggcatttttattaattttccggttgactacatgttcttatcaattaaatggacagccaggagggttagtggtgagagtccaggttgggctcagaggcctacattccagtgctggctccagctccttctgtgacctcagacactctggactgccagaggtcctcatctacccaaggaggggcttgaacatcagcctctgcctccaagactcttatattagcagctctcctatccccattcttcttcctcactgcatatcttagcctgggaggcagctcagcctcacctccaaggtggacagactcatcggagcaaagacttcagaaggcacccactcactcttcctcccttttcacagcctgggttgtcgttggcctccttggaggctggcagggagaggagagatcctggtctgggccttgagtctagctctcaggtacagcattcaaggacaacagcaaggatataggcagatgctaagaggttgggaccaaccaatgtattcccgctatccctgtggcctcttccaaaaagccatcatacctccgcttcaagcgaaagagccaggtttcctaaacactcctagagttagtggagtctaagatgtcatcctgtagattcctgaaaccattccaagcatgtggggtcatgtataatcataggaattaggaaataacatttatgcctataggggattaagaaaaccatggccccacatgggaacattatatagtcattgaaatggtaatggcgttgtaatgatattggaaatgcttatgatgtaatattaactctgaagagcaaggtgcaaaactggatagaatatgtactcaaccaggtaaaatacatcgaaaaaaaccaccagggtcgggcgcggtggttcatgtctgtaatcccagcactttgggagaccgaggcaggtggatcacctgaggtcaggagtgcaagaccagcctggccaacatggtgaaaacctgtctctactaaaaataaaaaattagccgggtatagtgttacgcccctgtagtcccagctacttgggaggctgaggcaggagaattgcttgaacctgggaggtggaggttgcagtgagccgagatcatgccactgcactctggcctgggtagcagagtgagattcccatctcaaaaacaaaaaacaaaacaaaacagcaacaacaacaaccagtacagaggatgggattgtggaacgttttttttcttgctttttgtatttgcattagtatgtttctgttgctggccaccccagccccttcctgaagccaggcctggctggctattttttgtaccatgtgacccccacccacttcccccttccgccttcgcaggcaccgctgactgggatgtcacttgtgggtagccagctataggcaggccaacaccatgtgacttgagtaatctggcctagaatgatgagctgagttatttgttcagctttcttcttgagctcagaaatgtgaactgggaaacaaagaaaaaattttgctccactggattgaagccgtggaggggaccagaacactgctagaggaatggccaccttgggcgaggggcttgttgaggctatgagggggcaggggccagaggccagcagagaaagccaagtcctggggacagagaagtcaacagcagccaccttggccaattcccccacaagcaacgttattcttgcaacacacccacattttcccttcaggtcaactgagagggtctctggtccttgcaactgaaaaatgttatcttacaccttccaaaatttctatggctctatactattattattattattgcttttgagacaggttctcactctgtggcccagattggagtgcaccggtgctatcacagctaactgtgactttgaactccaggcctcaagtgatcctcctgcctcagcctttggagtagctaagactacagtgtgtgtcaccacacctggctaatttatttatttatttgtttatttttatttttatttttttttgagacaatttcactcttgtcgcccaggctggagtgcaatggggtgatctcggctcactgtaacctccgcctcctgggttcaagggatactccagcctcatcctcccgaacagctgggattacaggcatctgccaccatgcctggctaattgtatttttagtagagacggggtttcgccatattggccaggctggtctcgaactcttgacttcaggtgatccacccacctcggcctcccaaagtgctgggattacaggtgtgagccaccacgcctggccctggctaatttttttttttttttttaatttttttgtagagatggagtctggccacagtgcccatgctgatcctgaactcctgggctcaagcaatcctccctcttcaccctcccaaagtattgggattacaggtgtgagccaccgcatacagcctatataacttttaataaaatagagaaccaccaaaaagggaaatccacagcatgtcaggtgaccctgccattttggaatgccttcttatacccagtcacatactataaattcgcctggtcttgtgtctttcaaccagggctatagaagagctagagttctaggctgttgggacattgtgcacccctggatgtccatctggggctttgccattagacagtctcagccaggcctgttggaaacaaactgccagggaaactgggcctcgtcacctttgacaggcaccttggcattgcctatcttgtgctgatcacatcctcagacaacgtttggtggatccccattctgtactgcctcacacactctcagctctctctctgtctctctctctctttttttttttttttttgatgttgtttcactctgtcgcccaggctggagtgcagtggcacgatgttggcttacagcaacctctgccttccgggttcaagcaattctcttgcctcagcctccagagtagctgggattacaggcgcccgccaccacatccagctaattttcatatttttagtagagacgggttttcaccatcttggccaggctggtcttgaactgcaggcctcaagtgatctgctcacctcggcctcccaaagtgctgggattacaactgtgagccactgcgcccagcctctctctctctttctctctctcacacgcagacactcacacacgtgtgcacacacacatgcatatgctcacacacacacagatgctcagacacacccaaaccaggacaccagcagcctggaaataccggacaagaaagtggaagaaaatatataatgagtttgatagaaccgggagtccatttcctgagcgaggggacttttgtgagtgagtacagacagataggagtgataactttcctggccctataagcctctagcatttccatcccctcacacacttcttcccttgaagtttctgttcttcacacttcctgctatctcaggctcttggccagatctgcggacttgaaaggcacagcagaatggcctcaaatgttcttcctcctggataaaatgcacacaaccacgcttacctgtctattagcggactttcttcctatttgcctgaaatgtggattgctgaacagaagaggcccaggatgaagtgggagagagggaccgaggagaaaaatgggaggagtatggactcttctggttttttttttgagatggagtctcgctctgccgcctgggctagagtgcaatggtgcaatctcagctcactgcaacctccacctcctgggttcaagcgattctcctgcttcagcctcccgagtagctgggattacaggtgcctgccaccacacctggctaattttttgtatttttgagtagagatggggtttcactatgtaggccaggctggtctcgaactcctgacctcgtgatccacctgcttcagcctcccaaagtgctgggattacaggcgtgagccaccgagcccggccatcttcttaaagtctagcttagcgcacccaccaagcctagtgcacccaccaccatctccctccaggcagacaggtttgatgcatcccaaagaaaactggctttggtgacctcaagtctgggcccatatcccaacttcagcatttaaaagctgtgtaaggcagtggctcacctgtaatcccagcactttgggaggccgaggcaggaggattgcttgagcccaagagttcgagaccagcctgggcaacatagccccatctctacaaaaaaaattaaaaattagccaggcatgaaagcttgcacctgtggtcccagctacttgagaggctgaggctggaggatcgcttgagcctgggaagtcaaggctgtagtgagttgtgatagcgccactgtactccagcctgagcgacagtatgagaccctgtctcaaacaaaacaaacccaactctgtgagcttgagcaaatttcttttttctgatttttttttttttttttttttgagacggagtctcgctctatcacccaggctggagtgcaatggcatgatcttggctcactgcaacctctgcctcccgggttcaaatgattctcctgtctcagcctcctgagtagctgggattacaggtgtctgacaccacaacttgctaatttttgtgtgtttttagtagagatggggtttcaccaggttggccaggatggtttcgaactcctgacctcaggtgatcctcttgcctcagcctcccagctgtaatcctcagctgggattacaggtgtgagctaccacacctggcctagcttgagcaaatttctcacccttcctgggcttcacttttcccagttgcaaaatgggaataagccgttctgttacgggaaggataaaaggagaaatggacataaaggtccatgcataccgcaagtgactttcttcatcttagggagtcagactgtggctgccttcccctcccgctcccctctggcttcctcctgggaatatgtccctcccaggaggctggtgggggctgggcagtcaccccaggctaggggggcatccaccttgcaaacccttccatagcagactgactgcttgctttgcagactgtcaacgggcagcgcagtccgggcccagggaagggctagtggcagctgcagctctgcgaccaggcttggaaacacgtgtcaaaccctattccaaccagatgaggctggcctgcttccaatggccgctttccatccaaggtctggccaaggggagctttgcccagatcccctccacaggcagcccaggcagcaagtcctatttgttcccctgagtcctcgggtccagactgacaagctcacctctctattccggaggctctgttcagaaggtccaagccatgagtcatgcagccctgcactgctggggaaggtgggaagggtaggtgcaggctccagggcacacagcaactggaagaagccatctgcccatcctgtaggtatggtcctctccctgacaaggctggtcctctccctgacaggcaggggaaggagctgggtaaaagaagaggacgaagagatgctctccaaccaccacaacatggggcaaacataggcctcctccagcgaagggaaatatcccatatgcagcagatgggcctgaggcaggtggccagagagccagtgacttctctttttgctgcttagaaatggtggctgaaaaaaacacacatgccaccaccacccaaaaaaactagagaatgcagcataccagcaaagagtcacagaaggaaaggaaatccaaatgttttgagtttagctattaagcatagtttccagcgagtgtactcatgtcttgaaatgaaacagatgaaagcaacatgtgtcaatggttgtaggaaggcaataatgtcatcaacaggaaataaagaaattgaacactgaagcctcagcccagaacttaactcttctcttgcccaggtccccaaggctttctgcatgaagactgaggacacttcctgcaagactaggtcactgcctctctccacctgcctggaaggtccttgaggcaccccctgcaaggatcacgagcacctgagaaggacttgctttgtttcttaagggatgtggccttggaagaaagggaaccccaagggaccctggcccagctgaagaggaagctgcacagcctctctctccatgaagaggctacaaagccttggctgtgggatcacagttcctggcagggacagtgctggctgctggaagagccagcaaagccaaggccaacgtgctggcactaaaagggctggtggcgccaccaggaagtcccgcaggccccaggaggctctgattgctgctcagggcccagaagctaggagatcccttcttagccaaccccccaacccgaggcagaatgcagagcgcatacacgggcccctctggccgatccaagagaacctcaggaagagcagggactttgggccttggaaggtgaggctaacgttcacatgccttgagagtggccgggatgactcttgcaggccagtctcgctggttgcttttatctctgatgaatccaccctatttggctttgggggtgcctgactcactgttgacattgtatgtcacttgcaaacaattcataaaacttaaatatcaaacagatcacactggatcaaatagatcaaacagatcaagtgggatcttggagtgagagcattcatgagttcagtttcagacctggccttagagcttttaggtccaggggtgctagacagcaccatgggctgcacctgttctctgcatcagagtcctgggggaggtctacacaaagccggattccagagcttttctctggagactcaggaggtcaggctgaggggtcagcagcttagcccagtgatttttagaccaccctggatcaagatagcctaaaacaatggatgtaattgtcattacatacaggtaaaattaatggacagaaatgcctcaattctttctcccataattaagaaaaaccaaccctaaaaaatatttggtaggtcttgacactgaattctagaacaggatctttggtatttgcccagaaatgtacatttgggtttactgtacccatgtgcattagtcagcttgggctgccatagcaaaacaccatacactgggtggttaaatcacagatatttacttctcacagttctggaggctggaagtccaagatgaagatgctgacgtctttggttcctggtgagggctctctttctggcttgcagagggctgccttctggctatgtcctgctatggctgagagacagagagagagcaagctctctggcatctctttttttttttttttttttagatgcagtctcactcttattgcccaggctggagtgcagtggcacgatctcagctcactgtagcctctgcctcctgggttccagcgattgccctgcctcagcctccccagtagctgagattacaggcacacgccaccacgcccggctaatttttgtattgtatttttagtagagatggggtttcaccatgttggccaggctggtgtcaaactcctgacctcaggtgatcagcctgcctcagcctccctaagtgctgggattacagacgtgagccactgtgcctggcctttgtgtctcctcttataggggcactaatcccaccatgagggccccatcctcatgacctcatctgaacctaatcacctcccaaaggccccatctctgaatattgggggtcagggcatcaacatgggaattttggggagacagattgggtccatagcaccatgtttcatggagctcctctgggagcatcaccaggttgttctgacccacatgtcaggtgcctgccaggtgggcactggcttagactcgggggcagtgtcagcaatggtcagacccggacttttgctcttcaggagctctcattgtgtgagagatcaacatagaaacagggtaacgaccaaggtggagatgtacccagggtgctaggggagcaaaagggggcactgagtctactttacaggagatgacaaggggtaaaatcagctcaaggaaactgagaagggcaaacctggaagatggaacagcatgagcacaggctctgaagctcgacgcagccttgggagaggggatggctccctgtggagccggacagtacgtaacccacagggggctgtctggagtggaagttgttgtggccagatcaaggagaaacccagggctctgctaggagtatggccttgacttcgcagataaattgtcttaaactgggtagtggaggagctacgtaacctgagctgggttttagaaagctccctgttgtgggcgtgttggggctggatgtaatgagaggtaggattcaggcagcagggaccccatgggagtccattacacgaatgtaagcgatcatatttgtttagatattcacattttatttcagcaactgtcttagatagggctccccagaaactgactctgtgaggggaatgcatgtgaattactaggaaaactgtaaggaaaatcctgcaggggagcgagggaatggaagggaaggaagccaagcaaggctgtgacaccgagcagtgtccacagaggggggactttggttccacccatggggaaatctggagacagcgtagcccactgctcaccactgttctggcttggggacaagggagctggaggatttataccccagcatctgtccaccactagttaagggctgggaggagattaaaggtatgcagacacttgctgctctcccagttgccagcaaaacacattctagaagcttccaccagagaggcagcaggaaacgctgcgagtgaagcaggaagaagctggtctccagggtggggtgggggtggggagagagggggttggagagcagagcactgagggcatctggtgccatgtgaggctgcccagggacttccagtgcatctcatgactagccagggccagccaggaattcctgcttgggaagtacttagtatggttcaaatctagaatgtcgaggaaagcccaaaacaggacagccgcatcagctccttttccgggattatggggactttataactcgaaaaaattttttccagctgggagtggacaagggatttggcaagcaaggaatgaccccatactgacctcaccagctaaccgagaaccacatcagtggctacaatagggctttgctgcaagaatcggggcccatccaagggctgccactgactggttaactaatgtggggaaggccaagttcccatccatcggttactcagtgctctttatctccacaatcacaacgactctacctgccctactcatctctaagatggttataaagataaaaatgggattccagcttgggcaagttttccaagaatgttcaaggcttgttgtaagtccatagtatatgccacttctgaaatgctgagtaatgtcagacaagggccagcagggagaaaagtgacatttactgaatgtcccctacaggttggcggctgcctttgcaagcttcatgcaggtgatgagaaggtgcatagggagaactttgaccttcaaggctggatactgacagaaaccttggtctgtccctgtggctgcagctatcactaaggcatgtggtctccacccaaaatgcaattaatcactgagcacgggcgttacctcttcagacttgtgaataaacagagatcaaagacagccagtcaatgagactctgataggcctttaaccaggcccggtgccagctcgctggccgcccgcactcctgatccagccagacacactcagccacccatatgtcaactgcctgtcctgccccccaccctccagggccaggccagccttccacagtgtcccagaaccattgagcttccaggttaacctcttccctgttataatgacgcacggaagtcacctttctcttggaaaaccaggactgtggatgacatggctgggacaccatccctttcccccttccccttgacagcccactgggtcctgtcactgatagacccaaaagcagagcatctccctctgaaacattcaaatctgtaccctaggcccatttacaaagctgacttgtctggagcctcaagactgcaagaaaacaacgagactctgactgtaacatctgaactgtcagggaacgcctgtataacctctgtcggcctctctgccaggcagggtttatgccccacctcactgtgggaaccctggtgccccagatgtggggatgagagtgagggggacggggagtctgtgccatgctccaggatggccaggctctcctggccacccccagtgtctacctcaaagtccccaccccattgcacagcacgggaacctgtgcccacagctctacagtgtgagctctttaagggcaaggaaaagattcattcacctttgcatttccagaacttcacccaaagcaggggcccagcacaggtaggtgtctttcatgcgggacccaccacacaccaccgggaatactgaggatctgagagcctgtgggacttgcccaagctaagctggtcagtgaacggcagggtctggacttgaacacaagtctgtctgacttcaaagtctgggcttgttccaatacattacacatatgtctgagctaagacatctgggtttacaacatcataaaaatcaaaggttggcaatacgttcccagcatccagtttcacacatggaccagttttgtcccagagccaaggactggcgaccctggcttcaggcacccctttgctgacaggagctctggggaagacagtgcagagggcactgtccatgcagcctctctgggggcaaggacaggccatactacagatgttttcagttaccaccaagttctctcttctctaagaggatgtaggctgccttgtataatatctacattagtggccaggcatagcggctcattatagacatgagttaccagcactgggaggctgaggcgggtggatcacctgaggtcaggagtttgagaccagcctggccaacatggtgaaaccccgtctctagtaaaaatacaaaaattagctgtgtgtggtggcatacacctgtgatcccagctacttgggaggctgaggcaggagaatcgcttgaaccggggaggtggaggttgcagtgagccgaaattgcactactgcactccagccttggcaacaaagcaagaccttgtctcaaaaaaaaaaatctaaattagcagatgattttcaaagtttttggattggattgtggaacaaatcatatcatttccctgtatcaggctacattgaatattcgccataattttattttatttatttttattcttaattttgaggcaggggctcgctgtgtcatccaggctggagtgcagtggtgtgatcatggctcttggcagccttgaactcctgggctcaagtaatcctcccacctcaaacctcccaagtaagctgggatgacaggtgcacaccaccatgcccagctaatcatcagaattttccaagaacaaatcaaatgaatgcatagcctatctgtgatcaaggagagtctatgttacacaccgctacacattacctgcccttcttcagggaacactctctatgatctctgataatccaggcacagttggccacagtgtttctcttttctttctttctttcttttttttttttttttttttgagatggagtctcgctcagttgcccaggctggagtacagtggcacgatctcagctcactgcagcctccgcctcccgggttcaagcgattctcgggcttcagcctcccgagtagctgggattacaggcgtgcaccaccacacctggctaatttttgtatttttagtagagatggggtttcaccatgttggccaggctggtcttgatctcttgacctcgtgatccgcccacctcggcctcccaaagtgctgggattacaggcgtgagccaccacgcccggccacagtgtttctttctgagcttaaaaaaccagaaagggggataaaaggttggaagtgaaatttggtcagctagttagatcatgagtgttaaaaggtaataaaatcaaggcggctgctggctctggccagagtcatcttcccaatacagcctttctgcaaaggtctggcagctgcagggcagccacaccacggtacaagagtcagttgcagacggagtaggaggtccccagctctctcctgccctcctttgattcttccacctgaggcccaagtatggcttgtgtcttgagatgctgcagtctctttccctagggtacatttatactgcttcagagaagcttttggtgtttttggttttttaaagaatagagacagaggccgggcatggtggctcacgcctgtaatgccagcactttgggaggctgagatggttggatcatttgaggtcaggaatcagagaccagcctggtcaatatggtgaagcctcatctctactaaaaatacaaaaattagccgggcgtggtggcacatgcctgtagtcccaactactcgagaggctgaggcaggagaatcacttgaacccgagaggcagaggttgcggtggagtgagaataagccattgcacttcaacctgggcgacagagcaaggctccatctcaaaaaaaaaaaaagaagaagaagaagaagaaattatttcagcctgacacggtccctcacacctgtaatcccagcactttgggaggctgaggcaggtggatcacttgagcccaggagtttgagaccagtctgggcaacagagtgagaccttatgtctacaaaattttttaaaaaaattagttggatgtggtggtgcatacctgtagtcccaactcacctggagaggctgaggtgggaggatccttgagcccacctcaagctgcagtgagccatgatcaaaccactgtacttcagcctgggtgacagagcgagaccttctctctctctctctcccccaccctgccatacatatatatattgttttttttttcctacagagacgaggtctcactctgtcacgcagcccaggctggtcttgaattcctggcctcaaccaatcctcctactcagagctagggttacaggtatgagccactgtgacagccatattttgtaaggaatggagtgagggctgcagatggatgggccacagtcttctcaggtgtgctggtgattgtctcctgagagctggacagaggcctctgcactctacctgcactcaggaaacatttacagaatcacactctgtgtggagcactgtgttgccctggtgggtctggggtgcatttcctggtccttggaggactcagatggctctctgtagaagcccaaaggagggttggtggggctgaggcatgttggcagtggtgaagatattctagtaacctcccccagcacccagccttcccactggttgggcctaggaatgtggtcagagagccctgccccgagtttgcagagaggctatagctgccctggcagctggtcaagcatctatccatttcaaaggctttttgttaaacttctaacagccgaaaggacagcctgaagccatgcgccaggaaggcctcccaattttggtggccaggaagtctattgagctcccctccaacctctccaacccctagaatggagacctgagctgggcaatcagcccaataaatcaggggatggcaccccaggggccatgatgacccaggggaggccccctctggctttgggatttactgaagggcaacgcacaggtgtgcagggcaagaagccgccaggaggccttggaaagatgctagccagggctgatgccagtgtcatacaagtgttgggtctccctggggcaatgttctagttggatgcagtcttcctttcttccccaggtcctgtctgctcatccagctctagctgtgggagtcagctctgcctttggtgggggttctgctactaccaattcacgggtgctctccaggcaagccatcttggcttttgaaatgttattttctcattcataaaataaagatgttggcccggtcaccaggtctgcttctctctgatgggtgtcagggatgtctcagaggatgcaaggagagtgagagaggtgggggaagcgggggaggcccctgagggatcaagccctcctcccacccacagggctccctggtccctggggattcccagcctgccctgcaaagccttcatgggtgccctgggcgcacccatgaagacccaggtccactgacaccaagaaaggaaggctttcctcccctccgcccccaaaccttgtgcctttaagtgtctttgtttgatctgaattcttgattgccgttgtggaggggtgtggctgagtgggacttttgatctcgcctccccagagtttctggggtctggtttggcagagaagtttggggttagcagcagtcactgccatccgtatgaggggggcgctcaggcccaaattgatgtcaggttcccggccgggcggagtgttacctggagctttgaagcttgtaatgtctccagaccgtcttctcaagtcagcggctacaaatgttaataaaattaaagccacctgagagttcagctgggcgatcctttgaaagcaagtctgtgatgggttattaccctcaattacctagttgtccactctcttcgcttggggttaaactcttaactcttccctttgaagtcattatccttttatctatgactggaccaaggaatttcaggacaataatcaatggaaacttcataagaatagaagacccgggaggggaaaaggtgtgaatatccctttaaccgttggggggaagggggatggggggtgggggatgggggccgagaaggccccgtgtccccaacttgaagaagtaaaaaaggaagtgggggtacctgataatgacccagcgagcaattttcagatcttctagaaaataaagagaaaacgataatttgggggcgatcagagaggtgcagccctcatcaaaggggaagggaaagtaatgaagcaaaaagacacaattaaagaatgggtttaattagggctttgatgtctgacatggtgcatgacactgttaaagggggagggggaccaactattcaagcgccaggaaatggcttattaaaaagatccgtcccccaaagacgctgccagaaaaaggggaaacttccatgccgcttctcccaccaaagagcaaagtcagtttcacttaaatcctcaccatcaggaggaaaaaacaccacaactcttttttttttttcgcaaaagtctttctgggttcccagaggcagcagctctttcaggattattatacttggtgctggcctctccctgtttaaagagagaaggaaagagagagagaggagaaaagaaggaaacaaaacaaaacaacaacaacaaaaaaacggagcgtgtgtgcactaacgaatgttggcaatgtgtgtttcatttctccttttcatttaatcccatttggaatgcttgtctacacagagaagacgaaaacacaggggggaagagccagtcgcactggaatgagcaagaagccttctccagtaacgaggagctgccccagcttggttttagatgtgacagagccgcgtctgcccctccaccgcgcagcccgcacctctcagcctgacacacacatgcacacacaaacaccgccagttgaggatttgaaagctcacattttgcccttgttacaactcccctactcctcattaaaaaaagaaataataaaataaaaactccttttattgtgtgcaacatctggaaagctcccttctccatctgctaggtcctgacagtgtttgcaaccacaaagccagcatctcctcctgcaatgtgtcatgaaggctgggggttggaagccctggtgagaaagcctgggagggggtcagacaaacaggcctgccctctgcctgctggatgttggagccagcacgggtccccttggcctgggttctggggtctgggcttcatgtgactctgagtttaagggaggcagccggtagccccctgagtctgttcagacaggaagcaatggctgagcattctcatgttcataggaataacttgagtcaggccctcctgccagtgccgggaagaaggacaaacagcttggagaccctaatgtgtatgcttgggattcaatttgaaatgagcctgttgggtttttatttcaaaacgctcctgtgttgggtttttatttcctctctcgtatttacacacacactcagctagcactctgggaaaaaaaaaaaaaaaagacagcaggttttgaaaagtagagtggtttatgtgaaaagatcaaaatgtttctcatactttctccaaaggcctagggctcttttctcccagggactgaactttttctcagagatagtaatcctttaaagcctcagccctcatttcttttaggtcactcttccatttcttggatttaaagaaaccagaggggtcagagatgtggacatgtcactcaaaatgagccacggggctctggtcatcctgctttgggggatgagggttagttagaatgagagcctgagtgatgatgggctggtggacagagtcacatgatccaggcccagccaatgagaagtcacagaagtttaggatggcttgagcaacggtcagggtggtgatgtcctcagctgtgatgatcttggacacagtgcctagacagatatgcatgtatttatatgtgaaccaaatgtgctgggctgtccaggatgctatgatgtatctgctcctaatgaaagcgaatgctaaagttagctcaacaaaaagcaaacttcttcagatcaagtgtcattattctagatacctaaaaggggctttataatacaatttatgcagaccctggaggaacttctacttgaattggagggactcctttgcttttctgcccaaactacaactgctcaagcatttctactgtgaagaaataaaagatttgaaaagcacggtaaggccaggcacagtgtctcatgcctgtaatcccagcagtttgggaggccgaggaggatggataatttgaggtcaggagttcgagaccaccctggccaacatgggaaaacctcgtctctactaaaaaaaaaaaaaaaaaaaagcaaaaaaattagccgggtagtagtggcccacacctgtaatcacagctactcgggaggctgaggcatgagaatcgcttgaacctgggacagggaggttacagcgagccgagatcgcaccactgcactccagtctgggcgacagagtgaaaccctgtctcaaacaaacaaacaaacaaacaaacaaaaaacatggtaagcctaaattggcccacattaagaataactgtaatctctcctcactttaggattttccattttatggtggttttctaatctttgcattgtaagattagaattggaaagtaagatatttggggatccttatagcatcttattttctatgcggaggggaaaaaaaccattatggagggcctggattttgtaaagagtttttaaatgccctgggttattctaaaagtttctttcctcacaaaaggaagacgtgacatgaagtatatataattttttatttttaaaattttttatttctttttgggacagagagtctcactttttcgcccaggctggagtgcagtggcataatctcagctcactgcaacctccacctcctaggttcaagcgattctcctgcctcagcctcccaagtagctaggattataggcatgcaacaccacaccgggctaatttttgtatttttggtagagacggggtttcaccacgttggccaggctggtcttgaactcctgacctcaagtgatccacccacctcagcctccccaagtgctggattacaggcacagccaccatgcctggtctgaagtatatttttgatgatccgttttgggacagtctcatcttggcttcggatatgcaattctgctgggcagaaaggactatggggaaagagggctctgggctggcactgaggccccaggagtctagctgggcaacgttgaaggctttcgggtaagtggggtcagggattggcttgatcccagcatcatttttccatattacccactggaatatgccaatatttcacctttacatagtgttggtggcgggggctgtttgtttatgtgacaaacatttctgcagcaagagaaaacggatgttaattaccaagtgaagctaaaccccagtttacgaagagccttctccaaaagaagctgcaggctacagagagaagtcttactttaggaaccaagtaaaaggctttcctttcatgttgtttgcagagaggaagtcttcgtttgtgatgagagtaggtgtcagaaacaggctcctattaaaggtggttttgctggaagcaggagaaggcccgaagccagggatattctttttaataagtccccggcctcaaagcagaaacagggccttggtcccactcagggatggatgcttcccgtccagtctcacactggaggtggggtggggtgcatgtgagtgtgtgagtgtgcgtgagtgggggtgtcattctgcgggagcaggggacactccagaatgcttttcactctcgtagaaggcaagagtgaacttaagacccacagtccccagggtaagtcacacctaccgccccaggaatccgggctttgcagagttttctctatagggtatagcccgagtccatgcctcactctgccacatactgactgaggataggtttcctgggacaagttacccaatccctccatgcctcaatttcctagcctgtaagacagaggaggactcctgcatcataggattggggacttattagaggtggtgtactgtctttgccacattgtatcaggcactcagtatactcattattttcccccccccgccttttttttgagacagagtttcactgttgttgcccaggctggagtgcaatggcgccatctcagctcaccgcaacctccgcctccaggttcaagcgattctcccgcgtcagcctcccgcgtagctgggattacaggcatgcgccaccacgcccggctaattttgtatttttagtagagacggagtttcttcatgttggtcaggctggtctcaaacccctgacctcaggtgatccacccgcctcggcctcccaaagtgttgggattataggcatgagccaccgcgcctggccttatttttccaacaattcttctgtgtgaacaaaaataggtaagaatgggttttgtttaggctccaagactgtaagctttctgagagtaggaactgcatctcactctgtagcctcaagttctagcacactgctgggagtatgatggacactaatacacagttgtggttgctgttatagatcactggagaactgctgttggtcaggagaggataggggatgagaactacagtagtctttgctttacacaagcataaatcttggccgggtgtgttggctgtaatcccagcactttgggaggtcgaggcgggtggatcacctgaggtcaggagctcgagaccagcctgaccaacatgttgaaaccccgtttctactaaaaatacaaaattagtcgggtgtggtggtgcacgcctgtaatcccagctacttgggaggctgaggcaggagaatcgtttgaacccaggaggcggaggttgcagtgagctgagatcatgccatgggactccagcctgggcaacaacggcaagactccatctcaaaaaaaaaaaagcataatcttacaggattgttaaaatcggacccattacttttatcgaacagatggcaaactttaaggacaagttgaagtctgtgtgtattaaacaggggcatctactgatagagcttggaaatgcaacctcagtctgttagatgttgcaaaggaggaggaagaggaggaggttcagagtttaaggatcctcaacccatagaatcagtagaagaggagataaatgtggaggaggcatttcaacttaggaagagtcaaatgctaccaagttctcaaattgctggtagtctgccacacctgggccattaagcacattcaacatgccacagacatccttcccacaagaatctgatcctagggagtgcctctgcttggccagcacttgagataaatctgcctccatctgccctggctatcttgtctgagcttcatgacccaccacaaacatgtaaaatgactgactagggcacaatttctaatggtggcacattaaaaaatgggatgttccaagagcggttcagaaccatggacttgatggatggtctgatggactgaactaaccaactgcagaggctcctctcctccacctggagacagtatctccagtcttgcaatagaagtcaatgggaaaacagtattcacttcgtagtgatctttgctggaacccgtgagtgtcatgcccttgccttagtgtttgctcttgggaagaggcgctgtgcagataatctgatgaggttgtctattcacttgtttccatgaacagttgctgaacacctactatgtgctgggcactgtgctaaggactgaagccctactagagcaccacaaaaggggtactctaggggacacatttgttctcgtgctcacctcgtgttagagtcattggagcaattcagcagtactgatgatccctggctagccaggtggccgtggccaagccatttacattctctgtcaattagttgcttcttcagtaaagtgaggggttggactagatcatctccaaagtctctttcagcaaaaacattctaagcatcatgctctgtgtggaaaagagcaggtaatcgccatcactctggataaacacagtgttactaaagggtggtaataaattttctcactgtctgtcataatcatgttctgccacatcatctctcttcacacacagatgtctttttcctctatcaaaagcctgctccctccctcctgagcgcctcatcactgttggtgccatccattctggcaggctccttattagaactgccaaagcactaaggccttgatgccatgcctgtcccctgacgcgaagtgaaacaagttaggtacatgacagcacatccactcttctctgagcacctcctgaagggaaggaggaagttgggctatttgaggtggaagaataaagacagggagagttctttccctaaaacagccacgttgatggcacagtggctcttcccagacgttcctcgcctttgcagggcttctgatagtcacctgattgattgcctaaaatctggggactttcctgggagctgctgaatggcatttgtttccatatctttggagaagattatcaggcatgagccttaacatcttagcatttttgtaattagtatttctccactgaaatggaaatgtcttctctcctaccctgttttactagaacatcgtgtagggtaggtcttctgttgttcaaaaaaagagcgactgtttggaacagtatgaaatatctttaaaggaacagtcaaatcatccattcaactaaataggagtcaactcccctagaaatcacttccaaaaacttctttggagtatgacattttcaaagcaaaattcttttcttttttcaaaataccacaagcaatgcattgagttcagggaatactgcctgccaaacttcaatttttatatttaacctttcttcttcttttttaatgtcttgcaaaaacatgcttgaaactcttcaaaaaccttttcagcttgaaagtttgtgagagagtcttaactgatgaaattctcagttcttagcttccctgtgtcttcccttccccctcctttggttaaggagaaaaattattattgtctgttcaccaaacaaggtcaactctaatcagcctgggaaagggactggcattcggtgctggctgctgacttttcacatctacattacctgagtgactcttaatcaggtcccagtgtatctttttaaaacaaaaactcataggttcttgggccattaagagtgagaaaccctaaaattgtgattgtggtagaaacatgacattgaacacacccaactccccctgtgtcaggacaaataagcattgtgtagtcaagttctgccaaagaaattgaaaatatatctataaagtggagctactggctagtcagtagaagaattgaacttttaaaaaggtgttgataaaatacttgttagaacaggaaaattggattagtggtggtgttctgggcatgacgtcctttgggccaaaaaaagaaaatgatcatgttgttctatttttcccggggcccagcaaagcagtctcagcccaaacatcaggcctctaatcttattttctttttctctagcatgtattttattaacccattttctcatttacccactctgaatagctcagtgggtagcatccttctcagaaagtgaaaacctccttggagatgctgtgtcgaagcagaaatgcacacaaacccccaccctagttgcagcaaagaaaagccccttctgtaatcctgtctggtgaatccacacattgtattccagcctgccaggagtgctcatgccttattaaaacatgggccatcaaggaatgcagctggcaacaggctggcagcttgcaaagtgattaacatctaggtagggatgaaaagaagtccttcccatccagggcccaaggcaaagggtttccacatatctgccacctggcaacaagctactgccccaaaataggatgggtccagagctgatggtcttttgaaggcatcaaagtgcagcttgccttggactgcatgttgtaggggatcagccatgggtttagattcagccaggtgacctgtgttcacatcttatttttgctaccatcttgatttaatgaccttcgacagccactttccttcttggagccaaattataggggtagtcctgagtcatcgatctcactggacagatgtgttgtgaagaattctagaccctcgaaataaagggtctagaatgcccagttctagcacccttggaatacagatgtagacataatgtccctatttcaaaggcaaagccttaaggtggggaataggtatgtatccctgcttccccactaccaatttcccattttgacttttgcaaaagtctgtcccatagtctctttgcaaaattgagatagggtggaggctgatgaagagctgcacaggaagtgagctcactcaatcaaaaccaacaaaccctcagtgcccactgtataccctagtctgtgccagttgctggacaacacaacatatacatcatgttgtactggggaagacaaaaccgcaatgagttaacactacactttcaccagaatggcttaagttttagaaactgtcaataccatgtgttggcaaagatatgaagcaatgggatctcacataccttgttgataagggtgtaaattcgttcaaccactttggaaaattgtttggcaatacctgctaaagctaaacatatgtctgtcctatgtcctggtaattctatttctggtacatatccaggggaaataattgtacatgttcaccaaaagacatatacaataatatccatagcagctatattcacaatagttccaaatgagagaaccagctctattactggaactggaacttgacacaatctttatgatctttgtctcttaatcttttatacaattaacatatccattcattcaaaaaataagaaaaatgctgtggaggtgattctttttttttttttttttttttttttagatggagtctcactctgtcgccaggctgggatgcagtggcatgatctcagttcactgcaacctccacccctccacctcctgggttcaagtgattctcctgcctcagcctcctgagtagctgggattacagtcacatgccaccacgcccagctaatttttgtatttttagtagagacagggtttcaccatgttggccaagatgggctcaatctcttgacctcgtgatccgcccacctcagcctcccaaagtgctaggattacaggcgtgagcactgcacctggctttttttttttttttttgagatgggggtcagagtatcactctgttggccaggctggagtgcaatggcaccacctcggctcactgcaacctctgcctcctaggctcaagcgattctcctgtctcagcctcctgagtagctgggattacaggcacgtgccaccacacccagcagctaacttttgtatttttagtagagacggggtttcaccatgttagtcaggctggtcttgaactcctgaccttgtgatccacctgccttggcctcccaaaatgctgggattacaggcatgagccactgcgcccggcctgtggaggtgattcttatgccttggaacatctaggatgtgtgtatgtttctgtgtgtgtatgttggagggggtggtgtcaaggaaaatggcatccaaggggatggttgggtctgttcctatttgaaatctttctatgcatctgtgggggtatggcattgggataaacactggggattcttcatggtagagacctcaccatctgtgcttctgaggcactggggccaagaaagcatcttgcacaaaatcaaaagtcagcaaatgttgacctgaactgaattccctgctctcagagatcttataacattgtcatagaacaacaacaacaacaacaacaacaacaaaatttcacccagaaacactgcaatttatggcaaatcatttagtcccagttgaaaacagctgtgtggtatggtactttgggcattaaaaaatttacacctgtcttagtccattttgtgttgctataccagaataccatagactgggtaatttataaagaagaagaatgtatttctcacagttctggaagctgggagttcaatattaaggtgttggcatcttgtgagggctttcctgatgctttctcccatggtggaagacggaaggggaaagggcaagagagcaacagagcgagcaaatggagctgaactcatttttataccaaagccactctggtgataactaacccactcctgagataacaacattaatccactcatgagggcagaactcttatgacctaatcacctcttattaggccccacctcccaacactgctgcattgggaattaagttgctgacacatgatctttgaggggtgcattcataccatagcaacatctaatcttagatccatcactaactggctatgtgatattgggtaagtctcttcttataatttggtctcagtttcctcatcttcaaatgatgagggcctagccatatgacctagattttcttgctgtggtcaaacaagaacatgaatgtgtttgtagttcacagatagcaaaggggtccttgctgacacttctgcttggggacttgaattgaagctcaaagctgcagggtgacgttggcctgagtcagcttccttccacaggaaacttgcaggtggtcagctgcagctcagcccgggcatgagatccactgggaggaaggggatcccctggcccactcacttctccgatgcatattcatgaggacagccagtcacccgaatgatgaggatgtgtttgtggaatctgtttggtcctttctaaagctctaatcccttcaggattcaaggtggcacaggagcagtagtgttgatgatgacaatctggaaatagcagccattacttcttgagcacctcctgtgtggcgcgtggcactttataaacctggtgggtgccagcaaaagctgactacgcatctcagactcatcacaatcaaaaccgagctcctggttgttcctctcaatctgctccacctgcagtcttctcatctctttttgggaaaactacctgctttgggttgctcaggccaatcattttgttttttgttttctttttttttttttttgagatggagttccctctgtcacccaggctggagtgcagtggtgtgaacttggctcactgcaacctctgcccccacgttaaagcaattctcctccctcagcctcctgagtagctgggattacaggcgcctgccacaaagcccggctaatttttgtatttttagtagagatggggtttcaccatgttggccaggctagtctcgaactcctgacctcaggtgatccacctgcctcggcctcccaaaatgctgggattacaggcgtgagccaccatgctcggccaggccagtcattttggagcttgcattttctctgtcacacgacacatctcatccatcaagaaatcccatcacaactgatgtgacaccatgggctgtgactgcactgctcttccaaatgcctaagtcggcctctcataacaatagtgatgtatttgctaccctttgttttttaacaaatcaaagaaaaggcattttagtggttcactaattcaattgactaaacaaagccacacgaccatggcttcaggccacatcacgctcagctctgcaattttctagtcggtgaactcgggccaaagcccccttcataagttcactgtggttgccttaccccatccaccccaactggccttgacctaaggatgtccccaaatgcttccacttttgctttgcttctgtctgcaaatctcccctcctccaccttccacaagagcttggggaggcttggcattgcgtggtctcttaggatgaaattcctcaaactcagtctccacaatatctgtgggcagtgtctcttcatttcctcaaggatcagagagcggggattaaatctcatggtgtcagggctggaggatagctgactctcaacccaaatcccttctgccagcactaaccaactccataaggaaaaagcccacttattacattgcattgggaattaagctgctgacgcatgatctttgagggacacgttcacaccatgataccttggaatatctagagtatgtgtatatttctgtgtgtgtatgttggagggggtggtgtcaaggaaaacagcattcaaggagatggctgtgtatgctcctatttgaaattttcctaagcatccgtggggacagggcattgggataaacactggggatccttcatggtagagaccacatcatctgtggtgtgtgtcgggactcaccataattcttaggtcacccatgagagatgctgccactgaagggggaggggtatttgaattggatacacaggttgtagatttaaaggcaatgcttgctatgttttcaaaacggaattttaaaatgaagtttgaaaagtcctgttgattttcaattagaaaaatttcatcttgggctgggcgcggtggctcatgcctgtaatcccagcattttggaaggctgaggcgggcggatcacgaggtcaggagttcgagaccatcctggccaacatggtgaaaccctgtgtctactaaaaatacaaaaatcagctgggcgtggtggcgggcacctgtaataccagctactcgggaggctgaggcaggagaatcatttgaaccctggaggtggagattgcagtgagctgagatcacaccattgcactccagcctgggcgacaggatgagactccatttcaaaataaataaataaataaataaaatttcatgttaacctctggtcccttttggtcattatgaagacacagtgaatggtataacaggatctttatttaaatggatttggttgtacaatgctccctgggatctggaagcgaaggaggatggatcgtaaagtacttttcatttgaaaaaatgatgtgctctggagtggaagtgaggacaagctggggttgggggtggaaactttgaaggggtaggaggcagaggactgattctaggagtcaattttagggattttgataaaaggtgtatttgcctgccagccccaaatgtctgctcatcttgggactctgaagaaagattttttctgggctagggtgatgtgtcaccttggaggggaagaggcagtgctaggcttagtacaatgaggggtagggtaggtgtaatatccctattctgcaggcggagagactaaactcagtgtgaccaagttgcctcccaaggttgcagagttagtcaatggcagaaccagacctaaaggcagctcaggcttgagtcaggtctgagccatgctctaccctggtcaggtgcgtgctggttccttaggtttcttaggagcagattcttatcacccacagtcccctggccaggaatgggccagtcccaggctgagccgtaagtgaagagagtgatgaggaagagtctgggttgtgggatggtggtgttgggcaggggacgtctcagtaggagggccctggattgagtgccttcctgtgtattcctaagaacctggtgttgagaccccgggcttggcggggtggggcagggcaccaaagcagagaagcacactggaaaagtaaacggcgtcctcctcctcattgccatcgctcctgtcgccgtgtgtggggtgctctgcaggtgctaggccctggcttggcatgatgggcaccactgcctttaatcctacagcaaccacaggttttctgacctaaggagtgaggcttacgagggaggggtaggggatctgaggacagtgcctctgtttctttgctggcaccaagggctggcagacacgactgcacaagttcttatgagaagtgggtatctgggagagcttccctttaggctgggagatgcagaggcaaggatgtgttccgttcattcccaatgcaaggggtaatgagagcaaaagaagcatctgcaggaaagagggcaccacctggcagctccaagttcacactggactttgaagcagtgcaggccccaactattcattcctcccccatagacagccaaatggccatactgtgcagggggtcccctaccttcacagatttatttccccagtatcaacagcagaggcagggacacacctcatgaacagctcataggaaacctcattccaccacaaggcatccgctcccacccaccagaaaaggcttcaaagcggcaaccaaaccttgatctagtggccagtttgggcacattccctcctcccgggtgacttccttctctattctttataagaaattcttgtaaagctctataaagtctaaaatgagggccaggcacggtggctcacacctgtaatcccagcactttgggaggccaaggcgggcggattacctgaggtcaggagtttgagaccagcctggccaacatggtgaaaccccgtctctaccaaaaaaaaaaaaaaaaaaaaaaaaaaaaaattagccgggcatggtggcgggcacctgtaatcccaactacttgggaggctgaagcaggagaatcgcttgaacccaggagacggaggttacagtgagctgagatcatgccactgtgctccaacctgggcaacagagtgacactctgtctccaaaaaaaaaaaaaaagaaaaaccaagaagtgtgacatcggaaggtcttctaacagtggttctcatcctggatgcacctttgaatcattaagaagttttaaaaacattcgcaaccccagccctgagcttttaatttaattggtctgcagtgggctccaggcctgggtgtgtcttagaagctcctcaggtgattttgatgtgcagcccagggtgagaggcactgtgccctctccctaagttagtagaagtcctcatcaggccctgctgcatcatcacggctgcttctccttgagagataacctcccagactcatttcttcatctgaaaagaaaagctaagggactctacctcatagaatggccatgaagagggttcagggagcaatgcctgtaaaagggccatgccctccaaaaatagatgatttacaatcagaactgatccacacttgaaaaccttgagttcaaagttttcatgttttatgttgttcaagaacaggccgggcacggtggctcatgcctataatcccagcactttgtgaggccaagacggatggattgctgagctcaggaattttagaccagcatgggcaacatggcaaaaccccatctctacaaaaaaagaaatacaaaaattagccaggcatggtggtgcacacttgggagcactcccatgctacttgggaggctgaggtaggaggatcccttgagcccaggaggttgaggctgcagtgagtcgtgatcatgcaactgcactccagtttgggtggcagagtgagatcctgtctcaaaaaaataaaaataaaaaagaataaacacagccagtgactcaggaactgtctacaccccgtttttcacctctgtgtaaactatagaaagtggggctccaggcttattctgaaggaaacctgcctcctgactttcaagggtttggaagctgctggcttctgagatatgatttgcacattatgctctcctggagcattttattttaagcaaaacgaaaaagaaatgtaacattttgaatctgtctttggccacagagagaatcaagcttggaaaagagggggctcagcttctttccttcctggctgccctaggaaccagaaacattccatccacatctctcctcagctgtttttccatcatctccaaacagaaaatcagagacatcagcaatgtgaaagccaaatcctatgggtctgaggtgttgtgaagggatccagttttaataatgtcccagtgtggggacatctggctggacatcaaagatctgttgattgcttcacactttccccacccattgctcaaggttagctacttatctgcttcctaagattttgtcatagagttttggcgttacaaagacccaagagatacagatcacgggctcacataatgcaatctcccatctcccactgctttcctgacaccactgctccaggacttagaggaatgagggcccgctaccttcaaggacaagggaagacctacctcaaatggtaactctaacctcgcaaataatgggaaaggctgcagcttcctcatggatcctttcccaactgcccagaggaatctctctccagagaactgggaggaaaccaagggcccaggcatggaacaatcaacagtgagcgaagccatttggaagggatgccaggactcccctcttgctattcccactccatttctcaaactcttacccaagagcaaactcttgcacataccactgtttgggaccctggccaagtgctgttctcctataaaatgtcttatcagatggtttatgaaattaagctttgttgctgtatcctacacttccaaacacacactgttcccacggccatggcagactaagcctttcaacccttctacaacccaagacacataaaatcctgaagaaactagtagatggacattggcccatgagtgaccattgtaaagaaaaaagacttggctcatctcaccatgggttaagttgatgtgtctaatactccacagtaagctgtgggtgtgtatttgtctgttcttgcactgctataaataaatacctgagactgggtaatttataaagaaaataggtttaattggctcatggttctccaggctacacaggaagcatggctggggaggcctcaggaaacttacaatcatggcggaaggtgaaggggaagcaggtacgtcttcacatggccagagccggaggaagagagatcttctgataactcactcattagcataagaacggcaccaaaggagaaatctgcctgaatgatccaatcacttcccaccaggccccacccccaacatcggtgattacaatctgacatgagatttgggtgtggacacagacccaaaccatatcaggatgtcagggaataagcaacaggaaagagactttgaagccaaaaacttggattctagacctaattttagcaactaggtagctgacctttgatctcagaaaaatcattttaccttagagattctcagctttctcatttgtaaaaaaaaaaaaaaaaaaaaaaagtgtgggggcattattaataccagctataagggtttgtccacacctttgggaaaattgagttaatggatgaaacaagatttttataatgataaagtcaaatgaaagggaggtggtatgtttaattcctaagacaggaagacattataacaaaggggaccaattctggaaagaaatgaaggccttgggtcaaagaaccaagaaaaggttttttttaaatatatgaaagtaaaaggaaggaaaacaagggaaaggcttctggttggccacaggtcagtagaagccaaaacaatagactttgagtggttgcaaggagcagaaactcctctgtcagccttgaataggcgggtggcatcaccagcacatcagccccattcctttgctagctctgagctttaactcctgtcaatgggaatcttcttggatgaggccaggccacagatcactggcccagtgactgagaagggggctgggttggctgcagctagaacaggggctaggggaagggcaggtcccctaaagagggtgctgtgagtatggcaggtgtcttgagatttaacctgacacagcaaccaggaaagtatacgtacccctaagctgcagtgatacatgtacaggatccagatcaaagcaggtagaaccggctgggcatggtggctcaagcctgtaataccagcactttgggaggccaaggcaggcgggtcacctgaggttgggagtttgagaccagcctggccaacatagtgaaaccccacctctactaaaaatacaaaaataagttgggtgtggtggcgtgtgcctgtaatctcagctactcaggggctgaggcaggagaatcgcttgaacctgggaggcggaggttgcagtgagccaagatagtgccattgcactccagcctgggtgacagagtgagactccgtctcaaaacaaacaaaacaaaggggacagaactcattcattcattcttcaacaaacatttattgaaagtctactatgtgccaattcaaattttatatctttgctttcaaagagctcaaagtccagggagacccggaaataaactattatcacacacacagtgcattaggagctacgagagtgatgtggacatcacattgcgggaatcagagcagacgttctttatcctgaggaggtgatggttgatacaagctgagtcccgaggaatgggtgggcattagccagggggctgcctggaaaaggtagctccagacagagggaatggcatgtgacaataccacaaggcatgaggccacatggcctcgccagaaagctgtaagtcatgtagcaaggcagggatgcctgtgggtgggacagtagaggtggctgctgggggtaagactccttcgcttgggaaatactgaaattagtacctgtgaagtgcctgctagatgccaggctctgtcaatacaaagatggaaacaatacaactctgcccttagggagtttcgtccagttggggaagacatccaggcatggacaatattgtgtgcataggatgtgctcattgcctgctatggactcacagaggaggcaactcaggttgtaaaggatattgagtactatgatgcggagaatggccttgattaagatcagctagaccaggggctaggggaaaacggagattaaggagtgcaggcaggagagtaacagggtgagagctgggttcccagaagataggctggagacggtggggaaaatggacagcagagcagtgaggctgctgaagaagctactgcaatagttgagaaatcacagaggcttgggctacggtgctgacagtgaagacagagaaaaggagaagagccagaaagctctgtagacgcttgaacttgcagaagctgggaactaattagatgtaagcatgaagggaaaaacagggttcaagcatctgttgggcttctgatgtgggtaactagtaaaggggacaagtttagttctagacattttgaaattcagtcgctcactgcgcatgagggtggagacatccagtagttagttgaagaaatggctctaagttcagaagaaaggcctgggtgggtgtcatagttgatgggtaaaagttgaagcttggatacggaaatgatcctatatggaatgaggtctacagaaaccaacaattaaggaaagcaggaggccgggtgcaatggctcccagcactttgggaggccgaggcgggtggatcacctgaggtcaggggtttgaaaccagcctggccaacatggtgaaaccctgtctctactaaaaatacagaaattagccaggtgtggtggtgggtgcctgtgatcccaactactcaggaggctgaggcaggagaattgcttgaaccccagaggtggaggttgcagtgagccaagatcatgcgccactacactccagcctgggtgacagagtgagcctccatcaaaaacaaacaaacaaacaaaaaaaaacaaaaacaaatgcagaagagaagcccataaaggagactgcaatggcagagacatggaggcagtgggtgggggtcgaggtgaaccagccaaaggagaagagtttgagagagtagagagtggaagaaaggcaggtgaggcaaaactggggatatcctttggatttgacaatgttgtaactttagcaagagcagtctcagtagttacaggcatgggaagcgagtctttagtgggttgaaaagtaagagaacagttggagagcggagacctatgtgtaacagcttttaagaaaagcatggctgaagggaagagagtaacccagaccatgtctggaagaaggcgttcagtgggcaccgctttttttttttttgagatggagtttcactctgttgcccaggctgaagtgcaacagcgggatcttggctcactgcaacctccgcctcccgggttcaagcgattctcctgcctcagcctcccgaatagttgggattacatgcacccgccaccatgcctggctaatttttgtatttttagtagagacagggtttcgccatgttggccaggctggtctcgaactcctgacctcaggtgatctgcccgccttggtctcccaaagtgctgggattacaggaatgagccactgtgcccggcctgggcaccactttttaagaggatgatcagcaaaccaagtgtgcccaggaggtcccacaagtggatgaaggatctggaaacaatggcacttaggagctactaaaagaactgaggattcttcatctgagatggtggttgagggagccttcttcaaatacccaaatgcctgtcataagggagaagaactcatttccttttaggtattcctaaagagcagaaataggactaatgggtagaagttacaggaaggacaattttgagccaatataaagaacagcttccaaccaagaagcgtttccaacaatgaaatggattgtcttggaagataaaaattttaccttttgactggaagcctttagctgattcaagaccagcacatgatgatgctggggaaccatccagaagcagcctgacttggatgctacttttccatcatccattgaatcccacccctccgtcctgggcctcattccacaagagacggagccagaagtgaccttaagggctcctggcaacctagagattttatgagcctaaaaagtttctaggccgggcgcagtggctcacgctgtaattccagcactttgggagactgaggcgggtggatcgcctgaggttaggagttcgataccagccatggagaaaccccatctctactaaaaatagaaaattagcagggagtggtggctcatgcctgtaatcccagctacttgggaggctgaagcaggagaattgcttgaacccaggaggcagggtttgcggtgagccgagatcgcgccattgtactgcagcacgggcaacaggagcgagactctgtctcaaaaaaaaaaaattctaattaaaagcatgcaaatgaggaaatcaatccactgcaagcttcacctgtgggccaaagcctgtctgctgtctgtttctgtgaataaaattgtactgcaatgcagatatacatggtcgatgactgcatttgcactgcaactgcagaattgagtagttgcaacagacagcatatggcctgaggctgaaaacatttgctatctggcgctttatagaaaaaattcgctgacctcctctctacatccctgagatagaatggttgaacacactggtctcccagtctaagctatacatctagctgagatttctcagcttatcttagacttagtatacatctttgggaacctgaatttgtaacacaaaaaaagagaccaacagagactcaggcctggagctgtcaaacaaacccaactacaggcgcatgttttattaggttcaggctgggttacaaataccaactgtgcaaggcaaactttgcatactccttttttttttttttttgagatgcagtctcactctcttgccaggctggagtgcagtggtgcaatcttggctcactgcaacctccacctcctgggttcaggtgattctcctgcctcagcctcccgagcagctaggactacaggtgtgtgccaccaagcccggctaatttttgtatttttagtagagacggggtttcaccatgttggtcaggatggtcttgatctcttgacctcgtgatctgcccgccttggcctcccaaagtgctggggttacaggcgtgaggcaccacgcctggcccgcactcttaaggtagaaacaaaatagccaaaggagtccggcagcttccctcaaagggggatgaaggggctttctaaaccacacagacttgggtcagatttgacggaagggagttctagccaaattcagagaatgtttcttcctcctgggtctactctatggctaacagcgacgcagacaagagttcttgtacagagtgtccaaaatctgctctgtactgcaatctaagagggtctgctcagccatgggcttctggaaggtgtataaataggcctacctttctgacctgagttttctcttccctgtaacattgggattggctgttttcaccaggaagtggccttttctttactcccgtccaattccacagaagtccatgctcccttacacttgagaatatgaagctgagcctgtagctactctgatggggttgcactcatgcaaggctgggaaggacacgcactgaccttacatataccagtgtttctccaatggaacacactgttctagaaaggggacaagttctcactcatcctgaatcctggatcattacagctactcttccttgaactctcaggttaggagacagcacttctcctgggctcctatttagaaccctcttatgaaatgtaccaccaaatcctatacattacaggtatttatataccactttattattttttttctagactgtgacctccctgggcacgggacttctgcctaattcatctttgaatcagtgcctgacacacagaggatgtgtcttgaatatacacagaatgaatcatggaatctttttttatttttttcagatggggtctcactctgttacccaggctggagtgcagtggtacgatcacagcttaccacagcctcgacctccctgggctcaggttatcctcccacctcagcctcccaagtagctgggactacaggcatttgccaccatgcccagctaattttatcattattattttgtagagatgcagtcccagtatgttgcccaggctggtctcaaactcctgggctcaagtaatcctcctgcttcagcctcccagtgttgggattacaggcatgagccactgcacctggcctgaatcactaaatcttttttttttttttttggagacagagtttcgctcttgtcgcccaggctggagtgcaatggcatgatctcggctcactgcaacctccacctcccgggttcaagcaattctcctgcctcagcctcccaagtagctgggatttcaggcacatgccaccacgcccagctaatttttgtatttttagtagagatgcggtttcgacatgttggccaggctggtctcaaacttctgacctcaggtgatccgcctgcctcggcctcccaaagtgctgggattacaggtgtgagccactgtgtcgggcctcactgaatcttaaaatctgctaagtagtggccacctgaataggctacaccaaagggaaaaactggcctcattccaaccagggtcaatcactctacagggggctgggagaactgggagaaatccatctcattagataattatgactgtgcccaaatttgtgactggccagtttggcaacactaggcacaggctgtgtattcatctacctgcaggatgaatcttggatgaaaaattaaatgaggcatgttattcttataaagcaaaggaaggaaatgaggagtctgaacatgagcggtgtattagtccattctcacgatgctataaagacacacccaagacgggataatttataaaggaaagaggcttaatggactcacagttccacatggctggggagacctcacaatcatggcagaaggcaaaggaggagaaaagtcatgtcttacacggtggcaggcaagagagcatgtgcaggggaactgccctttataaaaccatgagatctcataagatttattcactatcatgagaaccaaacagaaaaccctttccccatgattcagttacctcccacccgtccctcccatgattatgggagctacaattcaagatgagatttgggtagggacccagccagacgatatcaagcagactggaaaacgttccctgagttggtgaatgagaaagggaactggttacggcctgggcagacgaggtaaagtacaccatgccatggagagtgtgcagctcccacagtggtatgtggaaggcactgtgccctctgtcgaggaacgtggcccagtctgtcacccaacttctcctagacggtgtgggtcacttcttagccaactccgtcctcagagtggtactgaaccgttgatgaagggtacctatctgccaaaggagcagccacgtgggccgcttgctaagctgatctgaggaaaggaatcttccagacacattcttggaaagttcttgattcagcaaaggccattttctctgactacccaacagctctactctttccacccttcttgggttattacaatgaaaagttctacatgttttatctttataaaagttggaagaagtgaatttaacaattcttggttccagattcactaaataaagacaaacaatcctccacaagctaattggttaccaagctggtaacaagttaaattattcttatttttttctttctttttttttttttttttgagacagaatctcactctgtcacccaggctggagtgcagtagtgtgatcttggctcactgcaacctctgcctcctgggttcaagcgattctcctgcctcagcctcccaagtagctgggactataggtgcccaccaccacgcccggctaatttttgtatttttagtagagatggggtttcgccacatgggccagcctggtcttgaactcctgacctcaggtgatccgcctgcctcagcctcccaaagtgctgggattacaggcgtgagccactgtgcccagcctgaaatattcctttttgaaggcttttcttcatgggctgaactggttgaattttctaaaaatatgagctcaatgatgtcgggcagaaaatattaccttcatatcagcatttttcattgatccaagggccttggcattgcattcaaaattagagtcatctctagaaaatagttactgtggacttactgtgcatggatgatctagaaatccattgaatggtaactgcaggaagagaaaaattcccttgtctccttcattgatttttctgcacaattctttgatgcgtctgaataggtttttaaagctttctcttgtctgttgacatcaagccaacaagttcatttttggaagtgatgaaacactgctttggtggtgctaaaaatgtctacatgttctcatgtgtttagaagagaatttgttctaggccaggcacagtgactggtgcctgtaatcccaccacttcaggaggctgaggcaggtggatcacttgaggccaggagttggagaccagcctggccaaaatggtgaaactctgtctctactaaaaaatacaaaaattagctgggtgtggtgctgtgtgactgtagtcccagctactcaggaggctgaggcaggagaatcatttgaacccgggaggccaaggttgcagtgagctgagatcatgccactgcactccagcctggacgacaaagcgggactgtgtctcgaaacaaaacaaaacaaaacagaacaaaacaaaaattaggtggacatggtggcacgtgcatgtagtcccagctactcaggaggctgagacaagagaaatgcttgaacataggaagcagaggttgcagtgagccgagattgcgccactgcactccagactgagcaacagagtgagacactgtcaaaaaaaaaaaaaaaaaaaaaggaagagaattggttcttttactcaaactgaattggttcttttactcaaactactgcttgattctgaaacatatggattcatctcatctgattgggtttgtagtatcctatcaaaatttttcctcttccataaatgagtctatcacattctcttataactgaggaattggcactttacatgcttcaaatactttctgtgtccttcacaattgtgctcaccatcaaatgaaacctcttactttggactaaatgcgttatttccaaaactatggcctttcttgatcatttcattgatttgaaaatctgcacatcacatttactttccttaaatatagtgaagcaagaaaacattttaatacttgaattttttaaaaaatgaagtgttgccaaaaagatctgtttttttttttttttttttcctgatgctcaggatgaatcactagcaatcttgactttgactggtaagactgatataggtgatagtaaatacaggtttttgtggttagtaggggtcttaactctggttaagaaaagaccttaaagaagggacacataggaccaggcgtggtggctcccacctgtaatcccagcactttgtgaggcccaggttgggggatcacctgaggttgggagtttgagaccagcctggccaacacagggaaaccccatctctattaagaatacaaaaattgcctggtgtggtagtacacgcctgtgacccagctacttgggaggctgaggcatgggaatcactagaatctgggaggggaaggttgtggtgagctgagattgcactactgcactccagcctgggtggcagagttatagcagcgcaatttgcaattgcaaaaatatggaaccagcccaaatgcccatcaattaatgagaggataaagaaactgtgctctatatatactacggaatactactcagtcgtaaaaaggaatgaattattggcattcacaggaatccggatggaactggagactattattctaagtgaagtaactcaggaatggaaaagcaaacatcatatgttctcactcataagtgggagccaagctatgaagatgcaaaggcataagaatgacacaatagactttggggactcgaggtaaagggtgggagtggggtgagggataaaagactacaaattggggccgggcgtggtggctcacgcctgtaatcccagcactttgggaggccgaggtgtgtggatcacgaggtcaggagttcaagatcagcctggccaacatgatgaaaccccgtctctactaaaaatacaaaaattagcaaggtgtggtggcgggcacctgtaatcccagctacttgagaggctgaagcagagaattgcttgaacccgggaggtggaggttgcagtgagctgagatcacgccactgcattccagcctgggtgacagagcaagactctgtctcaaaaaaaaaagaatacaaattggattcagtgtatcctgctctggtgatgggtgcaccaaatttttacaaagaacttcatgtaactaaataccacttgttcccccaaaacctatggaaataaattgaaaaaaaaaaaagactgtctcaaaaaaaaaaaaaaaaaagaaaggacagataacaagactaagctgttcagcaagaagggtgaggggccgtttacagtcaatatcagctgcaggtaacatttctctttcaagatggcctaagcgggccgggcatggtggctcacgcctgtaatcccacccagcactttgggagagcgaagcgggtagataacttgaggtcaggagtttgagactggcctgatcaacgtggtgaaaccctctctcttctaaaaatacaaaaattgttggggggtggtggtatgcgcctgtaatcccagctacttgggaggctgaggcaagagaatcactagaatctgggaggtggaggttgcagtgagctgaggtcgtgccaatgcactccagcctgggtgacagagtgagactccacttcaaaaaaaaaaaaaaaagatggtctaagtgatttctacagtgtggcttctacatattaaacacatcactagtttgataaggctgcagtcattatctcttgtctatttatctggacggagaagctaagcatacagaatttaagtggctagcctaaaggccaacttaaccaaagtgttagaaatggaatctggctatcaatacaagctctctccttaagtattgtgaactatactttcactacaaagaatttgataacatgcctgaagacgcagtagaattataccttcttttctccatggtcagaaggcaattaagtaaaattcaactatccttaggggtgtaatcactttactaatacagataaaaccattatgaccaagtaggaattatagcataagctcagcacataaaatggaattatttaaattatactacagtgaagctagtcaggaataagactccatttatttttggcctgaacacttctttcagatgaagagaaatgttacttccagttttacatatatttctgggaacgaaactcagggcttgtccacaatactacaattttcctgtgttgggatcctctctacttgaagtgcctgggagaaaagcacatcctactcagcagtgagtggtaagtagtctaaaatcaagctcaccatcacccccagcatttcttagcttgatttcagccaatgccacctggcagaaaagtggcaccacttttacgataccagccaccgaaaaatcccaagtccatgctaccaacctctctctcactgttcggtctctgcgatcgactagctaactgacatgctttaaagttgcaacttggtctcaacttctctttttccacctgggagaggcacattctattactaaaagagaaatccagggctggattcatggtggcacagcccccagtttttggtacatctactcaaaccatagtcaattctacaggcgttcctggtagggaatgctacccccaacacgctctcaaagctatgctacagtcagtttgagctgactgaatttacccaacatctcaagggcatcgggacaaattggctttcctttgccacttctttgaaggacagttagcagatcaaaagcatttactgaatttacttctatagctccctccccacccctggagactgtaaagtacccaaatgtcctgttctcaattttcgttagtagaaaaagtcattttcccccttccttcctctaaataagctcacaacctaaactatttgacagaattgtaatgtcttgccttgctttgtaagtccctattaataacttttagtgttggcatgaaggaattttggtgccaaactatgaaaaacataagcaaaggaagatatttatgacttctagacattgtagtaagcatttataaaatttactaaagaatttaggatatgaaaatgtttttatgtagtaagaaagtcttaccagtatttacagaatttaacaagtttaatttcccttttaaagagttgtattatcttctggtgttcaatactaaagccccttacatggctgttttttgtttttttgagatggagtttcgctcttgttgcccatgctggagtgcagtggcgtgatctcagctcactgcaacctccgcctcccaggtccaagcgattctcctgtctcagcttcctgagtagctgggattacaggtgcctcccactatgccaggctaatttttggtatttttttttggtagagacagcgttttaccatgttggccaggctggtctcaaactcctgacctcaggtgatccgcccacctcagcctcccaaagtgctgggattacaggtgtgagccaccacacccagcctacatggctgtttttaatgcaatcttctctatccccaaaatgtttctatagtttggatgtgtgtctctgtccaaacctcatgttcaaatgtaatcctcaatggtgaaggtgggtggggcctggtgggaattgactggatcacgggggcatatttcttttatttttttcttttttttgagacagggtctcattctgttgcccaggccagaatgcagtggggtgatcacggctcactacaaccttgaccttccagattcaagcaatcctcccacttgaacctcccaagtagctgggaccaaaggcacataccaccacgcccagctaatttttgtattttttgtagagacagggttttgctatgttgcccaggctggtctcaaactcttgagctcaaacaatccaatttgccttggcctcccaaagtgctgggattataggcatgagccaccacgttgggccaacaggaagatatctaatgtatgattaagcaccatctccttgatgctgtccttttgatagtgagttctcatgagatctggttgtttaaaagtgtgtagcacctgctcccacctccttgctcctgcacctgccatgtaagacgcctgcttcctcgtcaccttccaccatgattggaagtatcctgaggccttcctagaagctgagcagatgccagcgccgtgcttcctgtatagcctgcagaactgtgagggaattaatcctctttttttttttttgagatggagtctcgctctgtcacccaggctggagtgcagtagcacgatctcagctcactgcaagctcctgggttcacaccattctcctgcctcagcctcctgagtagctgggactacaggtgcctgccaccaggcccagctaatttttttttttttgtatttttagtagagacggggtttcgccgtgttagccaggatggtcttgatctcctgaccttgtgatcctcccgcctaggcctcccaaagtgctggtattacaggcctgagccactgtgccccaccctcttttctttataaattacccaatctcaggtttatttttttttatagcaatgtaagaatggcctaatacaatgtcttcacaatcatttgcctgggttaactattgtttgcttgttttttgaggggagtgctggataatattaataagagtagttttgtgaataagtatactaacttgaggttaagttctacctaaatatcagcttaagtcaaagttgacattctgttgttgttagaataaaaatgcctgaaaaccaatgataattccagaatttaatattagtaaggatcagaagcaaaaatattttactgagtgcagaggaacttctctctcagaggatccattttattatcaggatttatcccgagggagggctagctggcaaagtggctaacttcgtttagcaactctacaaaatttataaattggtgcagactgtaggatgagagaagagctgaaaaacatttccctaaactttcgtaaataatccaggataccaattcacatggccaggcctgtatgagctccagtgattttgtgggtttagtgtctgctggagccaccccccactgcaaactgttatctagcatcaaaggaacttcctccaatccctaaggaactctcagaatgtctggtccactcgccactaagctcaggactctagatgtctgggagccactacactctttagtttggaccctcaaggaatttagatgtgtccgtctaacccactgcccattctgacttcctcctcaaaggcaaattcaaaggactttatcgtctttgaagtaccctttgtctaaccctgctggccacccctctcttatccactacttctctttcaaaaactcgtgcggtggctcatgcctataatcccagtactttgggaggcggagacgggcggatcacaaggtcaggagttcgagaccagcctgaccaacatggtgaaatcccgtctctactaaaaatacaaaaattagccaggtgtggtggcgtgcacctgtaatcccagctactcaggaggctgaggcaggagaatcgcttgaaccggggaggtggaggttgcattgagccgagattgcgccactgcactccagcctgggtgacagagtgagagcccatctcaaaaaacaaacaaaaaccaaaaaaactcctttcctcagcttccagaaagaacagtgcactctcccctggtcctctctgattcctcttcctctccttttctgttttccccaagaccttccccttcttggtgaaaccactggctctcccagcatcaactgtaacccagatgttcctggcttgacaaatctctgggccctgaccccggtttccagttgcctgatgaagctcattatatctaaacccaaactcatccttcttccctgactcaaacctgtgccacacaccttttgaggctagaaggcttggccccatgtcttctgaagctggaagccttggccccacatctgtttcttttttgcaatcatctcatttattcaggtgtcatggtggctactgaatctttgccccactttccattcacagagaaacgcctctctcactgacgacttggaccaatttatgggaatactgcacacattgcttacatttttctctgcctgcagcctcttgtctcttctaatccaggggtccccaacccccgggctgaggacctgtactggtgtgtggcctgttaggaatgggacctcacaacaggagatgagccgccttggagcaagcattaccacctgagctccaccctgtcagatcagggtggcattcgattctcacaggagtgtgaaccctattgtgaactgtgcatgcgagagatctaagttgcatgctctttatgagtctaatgcctgatgatccgaagtggaaccattttatcctgaaaccatccccactgtgtcctaccccctgcccctaccctgttcgtggaaaaattgtcttccatgaaactggtccctggtgccaaaaaaggttggggaccgctgctctaatccaccccatctccgctgggtgcggtggcttatgtgtgtaatcccagcactttgggaggctgaggtgggcagatcacctgaggtcaggagttcaagaccagcctggccaacatggtgaaaccctgtttctactaaaaaatacaaaaactagccaggcgtggtggcaggtgcctgtaatctcagctactcaggaggctgaggaagggagaattgtttgagcccgggaggcggaggttgcagtgagccgagatcgtgccactgcactccagtctgggcaacagagtaagactccatctaaaaaaaaaaaaaaaaaaaaaaaattccatcccatttcatgctgtagctggacacatgcttatacagcaatttctgatgatgttattcccctgttcaaatgactctaattgctcccctcttgcttataaaataacctccaaacttttcctgcatggagacaatgcattctagtgaaaagagcaaaagtgagtgaatcagagacacaagggttccaactgctgcttttgccagatgttagatatgtggccttggacaaatttccaaacttctctttgcttcagcttccccaaatagaaataagacttataaacttattgagaattgtcataaaattaaaacagccttcatttattgaaagtttattgcatgttagactttttaaaatgcaacacctcatttaatcttcataaccatgttctactattcctctattttctttttttttcttttctttctttttttctttttttttcttttttgagacagaatctctctctgtcacccaggctggagtgaagtggcgcgatcttggctcaccacaacctccgcctccggggttcaagtgattctcacgcctcaacctcctgagtagctgagactacaggcatgcaccaccacacctggctaatttttgtatttttagtacagatggggttttgccatgttggccagtctggtcttgaactcctggcctcaagtgacccgcccaccttagcctcccaaagtgctgagattacaggcgtgagtcactgcacctggccttattcctctattttttaggatcaggaaactcggactcagagaagctaagcacccagcccaattccagatccttaactgacctgtgctgaggccttgcctagtactgcaggtagacagtacatgtagttccctttgtcttccataatctgactctgacacaccttcaaaagcttatctcatgctagttttctcccagcagttgtcatctccatggtctgaactacctgaccggctgcgactccacctacaaggcccttccctgcatttctacctattgaagtcctactgctatcctaaactctagctaagtgtcacctcttcctagaagacctgattgcaaatgttcctgcctccctggaaatctcataatacttgccatttctcttacgcaaagatcatgttttctcttatattatcattttttcccttttgtgcatatgttttattttccttcttgaatcacaaactctttctgggcaaggagcatgttgccaaagtcttattcaaccttgtttgccttttaattccaggctcagtccctgggacagatgaggcacttgcaaaattctgtagaatatttaatttttgcacaaatttaatccagctttgaagcgttgagctcaatctacagtctgcatgaagtgaatgtgttcctcacgtgttagaggtgatatcacagggagaacagtaattacaatgtgagatggagatggggccaattagtctttcttctttgccaataaaaaggcagagagagtgaacattatatggttttaggcaaagtacctgacagcagggaccagcggtaggaggtctacttaggtttgctatcttaattagcctatttaaaaaagatttctggcactataaagatgtgcggatttgcctttgaaggtatatggatttaccatcactctcgcgtgcacgcacacacaccctcccacacacaccccacaatccaaataagacagtagaaagggttttaaaagaaaactcttaatctaccccatttctatttcagcagcttccaaattcacatgcccgaatgcaataaataaaaatactggagaagaaaatcagataatacaagtgggaactcagtcagagaaaggttctctaacattgtaggaaatatcactctaggcagaaaactgctaccagatccttaactctgagaaagaacaggtggagacatgatgagtcaacgccgctgaggcttcacgcagcagccaccgtggcccggcttgggtaaatatttttattacaaacacagtgatgcgtaatgggccaaacgatcagtcctgacaaagattgcccacaggactgtgacactgcagtagctgggaaagtgggctagaacccgagcttacacgaacctgacgagcagcatcagggttgatgtcaggttagtgacagctgccgtcacctcacaggaagcaaaactgggaaatgcaaaattcagttttgagaaatctcagtcgatggcaagacgtttctttaaaaactgcaagattcgcaggaccctccacgatcctcttaggcaaatatttcttcttaaggaaacagtgtcttttctatttttctttctccctcaaactctcacaggctctgcttcttggactgagctgaattcagtcaaaccaaccgtttagatgtcttctttcttccttccttccttccttttcttttcttccttccttctttctttctttctctctctccttccttccttccctcggtccctccctccctctctccctttctttctttcttttttagagatggagtctcaccctctcacccagactggagtgcagtggcgcgacctcggctcactgcaacctcaacctcccgggttcaagcgattctcctgcctcagcttccaaagtagctgggattacaggcatgcgccactacgcccagctactttttgtattttttaagtagagacagggtttcacaatatgttggccaggctggtcccgaactcctgactgcaggtgatccgccggccttggccttccaaagtgctggattacaggtgcaagccaccttgcccagcctgtttagctattttcaaaacacctgcggatcacagggttagaccaattgtctggtgactgtggcattcagtaagatgtggagagttaagagagcagaggggccgcccagcccctgcacctggctccctttacacagttaccttctcccccgacccccaggctcaggctgagaagaatgagatccaggagatgggctaagaggccaggagagagagaactgggctgtggtggtgagaaagtgagaaagctaacggggcaattagaaggctgattcatttgtttatctagatgattatgctctacttagttgaatagttttgaagtgctctgtggttcaggaaatttcctctcaaaggcttatcaggtccacagccttccatgtgcctgacagttccacgaaagaaggctcctgagcacagggtatgggttttgagggaccttttaataatacgcttgctaatataattaagtcaagtaatgcataccaaacctcaagccgaggagaggtgaaaaaaaattcaactaaggttacttccatcttttaaaagaacagagaaaaaagacatggcctcttaaatatccctaactcagggtttcccaagaagtgtttctaaatccccaactggacctgtgattctagaaatgcaacatagattaacagaatttttgaacaggaaggaacttttaagcaatatcttaggtttgggcttctctgatcaatatttcacagaactctacaataaaatatgtgagtcacagaagaagctgaaagataattccatggatcaaatcattttaggaaattgcagattaaagaaaggtaggccgggcgcagtggcttatgcctgtaattccagcactttgggaggctgaggcaggcggatcacctgaggtcaggagtttgagacctgcctgaccaacatggtgaaaccccgcctctacttaaaatacaaaattagccgggcatggtggcacatgcctgtaatcccagctactcgggaggctgaggcaggagaatcacttgaacccgggtggtgggggttgcagtgagccgagatcaccccattgcactccagcctgggcgacaagagcgaaactctgtcttaaaaaaaaaaaaaaagaaaagaaaagaaaaaagaaagataaattggtttctttagcaaagggtgtggcagcttacagacggcaacagattctttgcctttgctgggtctgcgtcctccgcccttgtctctgggtaggttctgtctttgacagttgaagtgatcctgccagtttctgggcactggccttatggggttggtagcttcaatgtctggtctctggctgggcttgcactggagggcacctcaaagctgccattccccagcagatgggcagcatcagttgcccaccatgtgaatgggtcttgtgggcttgagcccttgcctcccatgactgccacaccagccaacacctgactgcacctgcctgaaacccaagtgagaacagcctagctgagcccgatgaaccctcagcactgagcgagatgacaggaagttactgtttaagccattaagttttggggtggttcatgttgctgtatggcacacagctggcaatcagcaactatttatttaatgaatgaatgactgagtgagtgactgagtaaatgtgaatcttccagagggtgatatagcacgtcacatttcctaaatatgacacctgaacacttcaagacaaattttgcagaacagggcttgacggaatgctagtctgagaaacaataaatgagaaggttgaaatggtagagtttgggaaatattggtcgagttatgcccttttatgttatagattagaaaagtgagccagacaggtcaagagaattgcccaaggaaacaaaactaattgttagactccacctgtgaacgaatctcctttcctagctaaagtaaagggtatggatacaatggtctccctcccatagccacattttagctaattaaatagatcaggcttctaacttggtagccctctctttctgttccatgataaagtctttgtgtccaactagccattttccatgagacctcttttacgtggcagacttccaaagatgatataagagtatgaattaggctaggtgcagtggctcacacctgtaatcccagcactttgggaggccaaggcgggcagaccacttgaggccatgagtttgagaccagcctggccaacatggtaaaaccccatctctactaaaaataaaaaaaattagctgggcatggcggtgcacacctgtaatcccagctacttgggaggctgaggcagaagaatcgcttgaacccacaaggcggaggttgcagtgagctgagatcgcaccactgcactctagcctgggcaacagagcaacagagcaagactgtctccaaaaaataaaaaaaaataaaaaaatatatgtattagcctaaagtctagattaagcgttctcaaaatagcagcacccatagcaacatcttggttctttggttcttttggttttcggtccagttcatttgcctggactgggtgcggtggctcatgcctgtaatcccagcactttgagaggccgaggtgggtggatcaccagaggtcgggagttccagaccagcctgaccaacatggagaaaccctgtcactactaaaaatacaaaattagctgggcatggtggtccatccctgtagtcccagctactcgggaggctgaggcaggagaatcgcttgaacccggaggtggaggttgcagtgagccgagatcgtgccattgcactccagcctgcgcaacaagagtgaaattccgtcttaaaaacaaagaaacaaaacaaaacaaaacaaacatttgtctgacggaaatcctcgcttaaaatgtaaatgtctggaagaacagattttcagtggaattagctatcagtgaggaatccagattttaaaatttcttcagtcttatgttacaaatttaatttctcttcctccatatgagaagtaaatcacatgatctgattttaaaacaatatagtgaagaatgttaacactagccagctcaaaatctagggtattccattttacttttctttctttttttagacagtcttgctctgttgcccaggctggagtgcaatggcgccatctcagctcactgcaacctccacctcccaggttcaagcgattctcctgtgtcagcctcccaagcagctgggattacaggtgcacgccaccaggccagctaaatatttttttgtatttttactagagacaggatttcaccatgttggccaggatagtctcaatctactgaccttgtgatctgcccacctcagcctcccagagtgctgggattacaagcatgagccactgcgcctggcctccatttccacatttcaaataccattacagcctatgccactgcttcctaatcaagtctccaaagccaagaaccacttcaatatcagttgaaagaaagttttatctaattatcttcattccccactttgaattgaccaaccatgtatctttttctggttttatcaaaggggctgccaggacaaaagcacatccaattttaagtaggctttagttagcagacttaaaattgatcatgtattttagtttcagtaacttgcaattcctacaccctttgataattcactttaaagagcaaaccgtctttaatgacaaggcttaaaagagacgacctttctgaacaaaatatgaaagctcagaagagatagttcttttaaggaaactatgaattaaaatgaccttgtgttctgaaacttttctcccaccatttttgatgttttacctttcctttttactcttagaaagcaagctaagacaccactgccttctatggatggtgatgcacttcaataagagggctgttaattgttaattccaactcacagtttcttctgtctgcactgtctctgcagatgcctttaatgaggttgctcaccactgtaagcatacacctgtttctgaagaaatcactgttgatatgtgacatcacaggataatgtttgaatctgagctatttccctttaatcacagtcaattcttttgtacggtctaggaagcaagtccgtcattctctgttccctcagtcttcctgttttcttcattatgccccgatggctgccttctgtgaagttcattgttgagtggggaggttgcaaaatcagagctcagacccctgaaagggcgcactgcttggtgatgcagaaatggtggactcgaacaaaattgtgacatacgtggatgactgaatagctaactttgctgttagcccttctcttccctgaccccgtaagtggataataacaaacaccaagaacctggggttgcagagtgtttcttctgcttggcttgttccaaaccctttaccagccactacctgttgacaattacgtgttgaaatagaaaaagcacaggtggatgactcaggtacagcagccaataatgataacttgagatgtaacaaaattaggtacttgtgatgaacaattgatcttccagcagataaaagaacagatggaatcttagatgattttataataaggcacagtgtttataatttatttcctgagctctttctttttctcccagtagccatttctatactcaccgctcaactcggtaaggaatttcaaacatgccaaatgcaatttttctttctcttcctttatcagagaacgttcacaaagacattagagtcaaccatccattcctatcacatccaatcaaagtgacctaaagtttcattccctttactcccagacatacatgacatggttcagaagggaaacaggatctgggtaatgtcaaaggttcaccagtgtttgtaatttcataacccttgaaatgaggaaaagaaagaatggcaggcaaccttccaaaacacctactgatatttactcatggaaaacaaatagtcttgagtgggagttccaaagccagcatacaatacaattcacaagtattttcacctcaagcacctaataaccttactaatgaaatctggtgagcttcaacttgttttccatggtctgtacagaaagaagtacttaacaggaatcctgtaggaatctttcctttcagactaaatcatagtctgagtaccaataatcctcatttgttttaatagcatctgcaatgattttgctttttcctaaatattcttgaaaccagtactataatttattgtatatgcaggaaaaacctcatcttccaaaagacagagacttatattcctgagggaggtgtcagggtgtctgaacattaccaggctgagtggtagccccacagagatgagttagtgcaagaatcccaggcctcctactgatggccacagcccagccctgtttatgccaattccctccctggctttggaagtggctgtaaaacctgttacttccttatcatctctgtggctcagttacagtacaaaaaggggtaattaatccttgggctgcaaacaacagacttgggcgtgggaaagagaaaagaattttgaaaaagtgtaaataaactttgtgccctgtccttttacagtaaaccagaggattacagccccgcccatgggccagatttttagagagctcaaaatgcccatggcacacaccacactgcagtcgaaagaacttggggcatcccttcactcattctccgcaattcaaaatttccttggcaaatgggttgaccaatcatcacagaacagctcttgggcgtttgggtggggagagggacccagacttaaccatccactcatggaagcaacaccatagtctctcaaccaggcagtgaccacatgcaaaccgtaccgagtaaagcacattctgtgactacttgccaatgtgttgtgtcctcataacctgacctcacattttttaggctttcttaaggatcatcgattgatattataattaaaacgacaaccataaaaagggagatcaagaaagtaacaataaaaccacagcagctatctaaaattgttacaccatattctgcctctacggttccaggacgtgattggagaccaacaagacaaatacttggactgatatcagatgatccagcgattttatcctaaacaccaattcatgcactaattatggatttgattgttgacatgatataaggtatattttcccaaagtacaatttgagattgctaacatttgcttgggaaaaatatcatatatatgtcacacttattttagcaaatgaggtttgataaaaagtagaaataaaactggtaagtacaaaataatattttaataacataggaacatgaacatgaaaacaatgtaaacaggttagaatttttgatatgatactacaaacgtgattttgatcgtacgcaactggtaaaattctatgcaaaaggattaacaaggcatatcataggaaatcactttgcccaatataagcagttctcagcacatactcaaatgcacacaaacatgaaaatcggaaataaaggaatgttaaaaaaataacttaggcagacacaaataaaaccaccccactagtgtatgaatgatgcatgtttttatgatcttaattacatttaaggatttaaaaaatgccactgatctcacagtttacaatatccaaatcttcaaacctgctggaagaagtccacagcacagcctggaaattgcatccgttgcattctctcgtgcagttacctgtaaaccaaaaatcgcagtcacgactttctctaggtttaacaggtatgtcaatcaaaaaataagcttcaattctggagaagttgataggggttgaaaaggctatttgatatcaaaatgtcataatttatgcttatctataagggatcaaatcttacctacaccgagcaaacagaatctttcgaaaaatgtgtgattcacaagatctttccttttaattcaaagccaaataagtagttcagtctttcactgcacaaacaggaagggcgtttgatggaattacagcaggtaaacacaatctatgttagtgatggcactgggaacctttgactacaaaaggtctcatgcatccccaaaaagagcactgagggtactcaagtcactgtgagtgctggatcactgagctgttggtctattctggtctggagaacaatgccaaacccttgggggaaaggactttgaagatgtgagctatcctagcaagtactgcatcatctcactatcttaaaggaagatcgtgtctccttcactccatcactgggcctcaagacaacatcttgtcctcttgtccaggtaaggcctggacctgccatgcccctgcagatccttccatctttcatctttcttttttctttttcttttgtttttttttttggagacagagtcttactctgctgcccaggctggaatgcagtggtgtgatctcagctcactgcaacctccacctcccaggttcaagcaattctcctgcctcagcctcctgagtagctgggattataggcgtgtgccaccatacctagctaatttttgtatttttagtagagacaacgttttaccaagttggccaggctggtcttgaactcctgacctcaggtgatcctcctgccttggcctcccaaagtgctgggattacaggagtgagccactgtgcccggcagattctctcatcttgttttgatagtacagactaagcactgggatgagaaggggggtgacttcttaaagacatgctacttactaaaaacaagtctttttcaaaacttgtattatatccaagcattttaataaagacaaaggccagacaaggaggctcacaggtgacacaacacaaactaatcaggagacaagacacctgcttatgggctgtaccttctgccttgatatgtagtcagttcttcctgaaggatggaagctctcttttgcagaaaattaacctagaaaagacaccttgtgtgagaagaggtggacgtggcttacatgtcaatattgtgcaaatagtatggtaagattttatttaaattcagacaattccctagataaaactcagaggatttgttgaatgtcaatgttgtgttttttacatttggtcacatcccatccttattgaaaatccatcagttacgacagaataaagttcaaactcctcattgcagagccattttgatctggcccacccccatcattgtggctttacctgtcctcacgccctgcccaccactgctgcttccacaccgtgtctttctcgctccgttgctctttggcccaggccattttctctctttggaacacttgtctttctgtctcccattcatcctccaccatttggtttaaatgtcacctctcctgtggaatcgttcacctcctccccagctgctccttgcctcctagccccaggcaaagccagcggtcccctcctctgtgttcctcccctctattactggtacttctcaaactgctttgtggttatttgttttcatatctcttccctaaacctgagagcttctcttgggcaggaatgacttttctgtctttccaccccagtttcttttacagggctgggcatgtagctggtttcactagctgttgaatgaatgaatgaatgagtgagtgtaaggaaaattactgctttctggaaacctcaatccattctagggattccctgaggttggagagacagaacttcatagcggaaagagcctgagctttgtctggagttaggccaactttggttcaattcctggcttgccatctgtggctctaggaaaattacttaagctcttgatgcttaatctgtgaaatgggattaatgacagctacttcccaaggttatgaggatgacatgaaacaactatagaaaccgcctagtgcagagctcaaagcaggtacaacccccagaccgccattcttagggggctggaggaaactgggttgtttagcatattctcttaaatcagacctttacaaagcatttgattattgtgtagcatacatttctgtactgttaaagatgcctgtatcaggcgtggattcaaaagcaccttacacaacccaaatggtttggggccaacttataccatggcttaatgtaatcaagagtcagtggtatttgatcgtttcagaattgtttattcttacgtctttggtctgaactgaaaccatggcaacggttgatcccgaaacatagttatgcaagggagtacagctggcagaacagaaaatgtgcttgaaagagaagaaaacacagtctttctaagtgggtgcatctcaaagtggtcctcctggttttgcttatttgtatagcaccctggtcttcattttatccaattgctcaagtgacccataggacaattgataattttgacagatgcagggattacactgattcaacttccctcccccaaccatgctctgtaatcggaattccaacaattctcaaaaaacacaggcacctgtgctttcaaactaaatttgctcactgtatggcctgtgactcctgcgtgcagctgccaactctgaggccctatcgcagctggcagcactctctttctgggtcagcatccagttttaggaggctgaagtggcttttattacagtgaaatgatatgaatgataacagaagccctgcaggtgggtatcagattcctttttttttcctcttcctaaaaaaactcctctgaaggcgtcaggtcctacatagctgacactatctgtagctcacctacaaacttaatgggtaaaccacacctggagtggagattttcatgtaaataaaaattatttaaccctttgtatgttcccattctcctccactacttatttttatatgcaggcgtgaacaaaatttcatagcccttagaagcaaaatcgcaaacagtagcatatggattgagattatgaacatttcattttcagataagagaagttttactaggggaatataaaaggaacagctaaaatgtgttccacattttatcttacatactataaatagataacgtggatatcatcaaaccatatcatttattttattcataaatatatttattaagcacctgttatgtgccaggcaaagtacttgatacagggagtaaataaatcctttccttcatggaatttttcaaggaaaaaatatgtcttaaacttcaaagtgggctgggcacggtggctcatgcttgcaaaatgaggctgaggtgggcgaattgcttgaggtcaggagttcgagaccagcctggccaagatagcgaaaccctgtctctacaaacaaacccccgtttctaaaaattagctgggcgtggttgcatgcacctgtaatcccagttacttgggaggcagaggcaggagaatcgcttgaacctgggaggcagaaggtgcagtgagctgagatagcaccactgaactccagcctgggtgacaaagtgaaactctgtctcaaaaaaaaaaaaaaaaaatcaaagtgtattggagatgtgaatatgtaaactctttctcatgataccaacaatacgtaaaacattcaaacatgttagaagtttttctcacatcgtgaaccacatcacatttcttttttttctctctttctttcttttttttttttttttttgagacggagtcttcctctgtcacccaggctggagtgcactgggcgtgacctcggctcactgcaacctccgcgtcccaagttcaagtgattctcctgcctcagcctcctgagtagctgggataacaggcatgcaccaccatgcctggctaatttttgtatttttagtagagacggggtttcaccacgttggccaggctggtctcaaattcctgatctcaggtgatctgcccgctgtggcctcccaaagtgctgggattacaggcgtgagccactgcacccgaccatatatatatatatatatttttttttttttttttttgagacagtctttttctgtcatccaggctggagtgcagtggtgtgatctcggctcactgcaacctctgcctctggggttcaagtgattctcctgcctcagccttccaagtagttgggattacaggcacgggccaccacgccccgctaatttttgtatttttagtagagacgggattttgccgtgttggccaggatggtctcaaactcctgacctcaaatggtctgcctgcctcggcctcccaaagtgacaggattacaggtatgagccaccatgcccagccaagaaccacacatttcaacaagaactatttaacctaattgtttgaataccttgtcattattttgccttgaacttagaatacatcttgttatctctaacgaccatgtaaaatacaccagaataaaagtgcttctaacataactgtgctttcaatttctctgcccttctgcacagtgaggaatcagccatatgctaagtgatggcattttggacctgataccaagaataaaaggatgaggctatattggaaggtagactgtaaatgaattgaagttataactgactgaacttttcaattttaagggtgctttaaagaaattcttattgagacagtgagttattaaacaagtaagaaaaaaatttaaaacaaaatgaaaatttatcctgagtagtaggttatgcaatgacatcacattgatttctggcaacaatttggaatcagatttatttgcaagtttcttttcagagtatcccctaaatccttggaaaatgccttgattctagtaattacctgtgattttagggaggaaatggtgtcttcaagttcttgtcttagggatgctggcatcaatcctttcaattttgtttcatattcttgtcgtatgtaagttatctaaattggaaaaaaattaagagttatctttttaccacataaatgattgttttggatttaagaagtcccagaacagatctgttcatcacaatgaaaggtttgttacacgcggtcagaaaccagacaataaagatgaaataagaagaaagagttaaaaactgaaaaggctacccagtctgaccctgtgactctgagagagatggtccctgtaacaatgctttatttatttaaaatcctcatgaacacaattttcagcatctgataagtaaaataatttttctctcctcttcactcatgaggttccccactatgctagccctgcagcctctccttgatcaggatgtgaactccaaccatactaagctgtcatctgaggacaactcatagcatgtctctgctttgatgaaaatactccttgagggggtggtggctcacgcctgtagtcccagcactttgggaggctgaggtgggcagatcacttgagcccaggagtttgagaccagcctgggcatctctaaaaatatataaaaattagctgggcatggtggtgcacaattgtagtttcagctacctgggaggctgaggtgggaggatcctttgagcccaggagatcaaggctgcagtgagccaagatcgggccactgcactccagtctgggtgacagagtaagactttttccaccaaaacccccaaaaatccctactcctccaaactgtcaggtagttggggcactaaatgtgattcatataatcatgaagacatgaatgaaggagaatctgcatagctgtgtctccgaccctctttgacacaagtagacaggtagagtgcactgggcataggaaggttcctggttcctggtttctttctgcctcccaaatactatcgggcctgtgtttaactaactgatgctcactgggctagtaaaaaaaataggttggtggctcatcccattcatctctctcaaggctaaaggagtgagtgagagggtagaagaaaagcctttggaagaatatgcctgagcaggatgaagatgtgcatggatgaggcgtgaatatgcatgtgtagatattggtgtctttttccagctgtgtttctgcatttctcttccacctactgtgaaataggatagaattaattattttaaaaatctgttgcatgtgctgtgcatgacttaaccaaacattaaagctgagttgcagtgtatcataccaagtgattcatcatacgcacctggaaataggcaatatactatgaaaattgtgtacgactgagttgagttggataagcctatcaatttgctgaagacaatttaaaattaacagtctttaagaccgaacttttcttacactaaactgaattaaggaaaaaatgtgcttaacaattcatttcattacctactaaaatcctgtggccactgttatagaacataaattttcaatttttggcaaagtgctttttttgggatatgttataatcctgtgacttatacctaaaggaaaaaaagaaataataaaacatgatctctcccacagatgcaaagtctttgctgatgaaatatctgttgattctcctgtctactgatttttctcaccttctcttcttcagcttacctccaagtgagccagttccagctactcacttacttgagtcagttagctgattcaaatgaaggaaaaatgcaaagcaaaacgcatgctttataaaccagacctcagggtaacatttattgagggttcatgggttatatattgactatttttttttctatcactcaacactggttctgaaagtttgagtttcaactcttttaaaaacaactcatgcatgcgctatttcctttttaaacaaattttattctgtattttactactgaaatatgttgtcctacccatcccaccccacagtaaaaatctcatccaggctccctatttctttcccttatcccctcttccaccacaccatcccgggacaagtgctccaggattccctgcccactggccattctggagtgtgtcctttgggtagcaatgtggaaaccaccagggcctttgtggagaaaatggagggggctgaaggagtcccaagaggggcttattggagggccttggatccttgctcataggtgagcttgatctcatcatctggacaggtggaggcagattcttcctgagcataggcattgctcaagtactgctgcacgccctggaaggcctcagggatggtgaatccctggtattttttttttcttttgagatggcatttcaatctgtcgcccaggctgtagtgcagtggcatgatcttggctcactgcaacctctgcctcccaggttccagctattctcttgcctcagcctcctgagtagctgggattacaagcacgcaccaccacacctggctaattttttttttttttttagtagagatggagtttcaccttgtaggctaggctggtcttgaactcttgacctcaagtgatctgcctgcctcggcctcccaaagtgttgggattacaggcgtgagccatgacacccgggccccctggtacttcttacacaccacttgtactatgtggagcgttagcaacaggttgcagtcagccagggtgagctcattgccatccagaaacttcctctgagagatgccttcatcttcagcactggtttcatccacttcttctgagtggcaggatatcaagtgattgtctaaaaccttcagggctttcaggagtcccttctccagattgtcattgactactgggtttgaattcttgatgtaagcagaaaatttggcaaatatgtcctgctcagctgtgttggattcagggttcagagctgccagcttggggtacctaggagggcacagcactgcctacagaaattcctcaatcttgttggtgtccttgtgttcttccatgccatacagcaggaatgggagctgccctcctgggcacagcttttgcactatcttggtctgcctcttggtgtcaatgatggtgacattgaaggtgactcccttgagccacagcaccatgaacagtctctagaaggggcagttcccaatcttggccccatcactgccagccttcacgaacaattcaacttgcagttgttcttcagctatggttgcgttggggaccagaaagtggccatagctgggggaactggggcatgaactgtttcttacatccttatctgtttagaatgtctatctgttttcctaagctggcactcggcaagaaggccatgttccatttgagtgccaagatggtgaagcccaatggtgagaagccggacaagttcaagtctggcattttccagggtcttctgaagctggagatgaactcggacctcaaggcttagctcggttgcatttataatgcagtccttgaggattcggtcttctcacgtgaaactggatggcagccagctcatacaggttaatttggacaaagcacagcagaacaatatggaacacaaggtcaaaactttttctgatgtctataaggagctcatgggcaaagacgttgattttgactttccagaatttcaattgtaaacacaaattataaagtatattcacagtagaaaaacaaaaaagtctatccattgcctgcatatttaaaagacaactttgctgggtataaaaatgcttcaatcccactttctttctctcataactttgtgaacacaaagatcaagttagctaggcatggtggtgtgcacctgtagtcccaactacttgggaggctgaagtaggaggattacttgagcccctcagaacatttctccagtgttttctggcattacatattgccatggtaaagtctgaggccaatctgatttttttcatgttgaatataactttctttttctgcttggatgctatgattttctttttccttcatttagtaacttcactgggaaatgctttgatactaattattttatattaattttcctgagacattgtgtgccctttctacctttacattgcattatttgaacagaagtttcctttgttagaataattacttgtattttattatatatatatacttatatgtatttttttctgttggttctcttcttcagagacacaaactttgcatgtgttgacccttctttgacaatctcccataattatacattttatctattattacttttattttcatatcattttattttgagacagggtcttgctatgttgcccaggctggtctccaactcctggactcaaccaatcttcctgcctcagcctcctgagtagttggaattacgtgcatgcatcactgcaccaaactcttcttatcgttttatatctattttatattttcatttcattttgtataatagcctctagcctaattactatatttccttggatggttttagttatgatttttctatttttgtttcatctactatggtttcaatctctgtaatcttttgcttttgtctaccatttttcctaagctctgagagatcacttttcatctgtctgttgacttatatcatctttagatatgtctcttcttttttctatttctctatctccctccaccattttccttgtgagagagatgtttaaatgtgttttgtgaatgctttgacactgtgaagagctgttataaagaactgtaattagtctgaaccttcctcctgtaattttccatttgatatacagaacagtatttgcttacattctttcttctcctctcttttaatccagcaaagatcatatgctagttcctttttctaaaagaaaaattacacctcctttttgaatggaaccagctatttgctgagagttgaggtgtggtgggggcagctggggtcaggccacagctatgctttggttttgtcgtcttcattacactttgaccaaatctatgatttcatttgctctgggggcctatgtccctcagttttcaagtactttggaggtcacggccaagtacttaagccctttggttcacgcttatggttggtttctcttgactctccttcctcctgccctgcccactattcacatgtgatggtttctctctagtaggaggctaggccatagagagtagaagattgggtgtgactaaggttgctctttgatcgccattattccttccatcacttttcaaattcagaagttatattttccaacatttattgaagattcgtgcatttatacttcctgtctactcctttattcttagtttttgtgattttagtgagtttgaatgaatttaaaataagcctctggaaaatatgaaattacctcatgtgtgagtgagactgtcaactgggaaaatattactaccctgaattcttaaactcaaatgctcaatttaaaaatcattatgtaaagctgaatcctgttacttcaataaagtcatgaaaaactttaaccaatctgttttcattctatttatgaggttaataaaattatcacgagcaaacatttactgaggactttctgtgtgccaggtgtgactctccatgtttttatatggacttaatccttctgatgacccaatgagggaagcatagagaggtaaaacatgatttgaactcaggtagtctgactctcaagcacatatgattgtccactttgctctacagtttctcaaataatccttctaaatgctgagctgatttttccaccccagggggaagagaatgccagagacacgtgggttagaggagtctttgctaccacgctctagtgctttccccagcacaacaggggccagggccaggggatggggcgttgaactgcagtgcttccagacatccatctagtcagcgatctttttaaaaatgtgacaacaataacaatgacaacaacaactggttccagaggactccccacgccttcccattgattttaaaattttagcttactacagatttatatacgaccaactgaagaaaacctacacaaatgcaacgtatatgtctgacctaaaataaaagtttcacaaattccccaaagaagcacatattcaaaaatccaaccagtgaaggatacatgtaaatttgtcacatggcaaaatgacaaaagaaaaggaaataattagtttatattcctatatatcactcttgattcttgtttttttttttttttttgagacagagttttgcttttgttgcccaggctggagtgcaatggcgcgatctcggctcagcgcaacctccgcctcctgggttcaagcgattctcctgcctcagcctcccgagtagctgggattataggcatgcaccaccattcctggctaattttgtatttttagtagagatggggtttctccatgttggtcagtctggtctcgaactctcgatctcaggtgatccacccaccttggcctcccaaagtactgggattacaggcataagccactgtgcccggccttttttttttttttttttcaagagacagggtcttgctctgttatctaggctggagtgccatggcacaatcacagcttattgcagcctcaacctcccgaggctcaagtgatcctcctgcctcagcctcccgagtagctgggactacaggtgcgtgccaccatgcccagctaattttttttttttttttccccatatggatagtttctcactatgttgcctaggctggtctcaaactcctgggctcaagtgatcctcatgcctcggcctcccaaagtgctaagatgataggcataagccaccatgcctggcttttgctactgcttttctatccccacctctgacccaggctgtgtttaaggggaaacaatgagagaatgagaacttttacctgtggactattcatgaacttggaactgcttgactatgaaacaatctggccttacaacagaccatgaagcaagatgaggttgagtggagttaagcaatgggtttgatggacacaaaattcctttgattcaagatcaaaatttttactcatacatgtattttattattatatttgaatattaaattcattagcataaagtgtcctattataccagtgagtgatgtctattaaacacgaaggtattcaaaggctggtctgctgtggttcatttccatcctctctccattcccatcatcctcaaaaagcactgtggataatcacgtgctcttccacatccctcaaccacatcgcaccaaagagaggggcttccctctctccaccacggttacttctctctctaccttccttcatcttccttcctttagcaaaataaaattaggaaactcactcaggacattgtgataatgacatttctataactagtaatgactcctgtaagctgagtggaaatggggtctttataacatggtgcccatgtgactaaagggctgtgccctgctccatggcaatagactgcccacttttccctccaaggcacggcactgacactatgattcccttaacttttaaagtgaactgtgaagaccaagaccatccctaactagagtttcatgttccaatcaagtagaactgaaatcaagggtaatcagacaaatgatcatttgcataaataatagactataaggtgtatggaatgtgcagttgacttgagccaaagggtccgtagagataaaaattcaaagtgacattggaaaaaaggagccttgaaaatctataatttcattaaaaatagcgaagggagaactaaaacatattttatgatgtttttattcaaaaaacaccacattgaccgggtggactggctcatgcctgtaatcccagcactctgggaggccgaggtgggtggatcacctgaggtcaggagttcaagaccagcctagccaacatggcgaaaccccatctccactaaaaatacaaaaattagccaggcatggtggcaggcgcctgtaatcccagctactcgggaggctgaggcagaagaatcgcttgaagccaggacgtggaggttgcagtgagccaacatcgtgccactgcactctagcctgggcaacagagtgagagtctgtctcaaaacaaacaaacaaacaaacaaacacacacacacacacacacacacacacacacacacacacacacactgtatcaaccaatcatgtcaatatgtcaaaaccatgtcaaatatgtcaactggtttataataaaacaaaaactaagatggaaatgtgcagctctgtgcaatcagcttaggcacaggcctcaaatgcaagttattttattgcaagctccaatgtgcctaacacggaattgtcttttgaggagctgagaaaagaggaacctcctattccattgccactggtttatgctacagtggtggtttatatgtctctgcatagtcctttattatcatattttgaagtaagggtgaagcagttcaggaaaataagtgtgcatgaggccaggtgtggtggctcatgcctctaatcccagcactttgggaggctgaggcaggagtattgcttgaactcaagagttcaagaccagcctgggcaacataatgagacctcatttctactaaaaataaaaaaaaattagctgggcgtggtggcatgcatctgcggtcccagctacttgagagtctgaggtgggagggtcacttgagtccaggagatccaggcttcagtgagctatgtttgtgccactgcacccagcctaggcaactgaataagaccctgtctcaaaaaaaaaaaaaaaaaagtgtgcccaatattactttacaaagcccaacaagcatttctgggggcagttcagcagagaaaaaggggaactaagtaaaaattctatggatgttatctccttaatctctttccactttgccactggtaccatcccaatccagaatacattcaatacattcatcttgcacctggatgactgcaatattggtatgttggttttgcttttcaagcagaatttgcttaacttttaagatcaaaattaatatcctgtatatggccaacaaggccctgtactgtctggccctatccacctgctaacctcctgcaactccagagagtcacctggcctctggaataccagacatgtttgctttcttccaattcattcaccaatgccctgtgctttttctcacaacaggatggttcttgttttttctctaattcttctttcttgttgtgtggggttttgccactgtgtccatctggacatctggatgttgggggcccctgctctgtggtgatgtcagggagggtgcagatctaggcacccagggggagggagcttggccagaccttcatgatgaggctgtgttggggccaactgactcccctttagacaagccatatagccctgagtgtggcaggcatgagcttcattagcaaaaacgggccccacaccagcccttgctttcaagctgcaacccaggctcctagcactttcctggcaaggagcacttctagcatttttagcccctgtcatccctaacacgtttcctcccagctgcctctgcttgctgctgggctcagtacctggaggctgtggcctcactcaccacttgggttctgctctgtttctacatcacagagatgttcgtcttgcttttaataccaaatactggccaggagcggtggctcatgcctgtaatcccagcactttgggaggccaaggtgggcagatcacctgaggtcaagagttcaagaccagcctagccaacatggtgaaaactctctactaaaaaaaaaaaaaaaaaaaaaaaaaaattagctgggcatggtggtgagtgcctgtagtcccagctactcagggaggctgacgcaggagaatcgcttgaacccaggaggcggaggttgcagtgagccaagaaaacaaatccatctttctaattctctctctcgctctcttttttttctctctttctctatatattttttatgtatatatatattttatttccataaggtttttggggaacaggtggtatttggttacatgggtaagttctttagtggtgatttgggaaaatttggtgcaaaccatcacctgagcagtgtacactgaacccagtgtatagtcttttattcctcgcccccttcccaccctttctccctgagtccccaaagtccattgtgtcattcttattcctttgtatcctcatagcttagctcccacttacgagtgagaacatatggtgtttagttttccatccctgagttacttcacttagagtaatagtctccaactccattcagggtgctgtgaatgccattaattcattcctttttatggctgagtagtattctattgcatatagaccacagtttctttatccactcattgattgatggacatctgggttggttccacgtttatgcaccccttgtgaattgtgctgccataaacatgtgtgtgcaagtatctttttcatttaatgacttcttttcctctgggtagatacccagtagtgggattgctggatcaagtgatagttctactctctcttctttaagaaatatccacactgttttccatagtggttgtactagtttacattcccaacagcagtgcagaagtgttcccttttcattgcatccacaccaaaatctattattttttgattttttgattatggtcattccttccttcctctctttctttctctttctttctccttccttccttccttccttctttccttccttccttcctttcttttctttctttcttgtcaagtctcactctgtcacccaggcagaagtgcagtgtcatggtctcagctcactacaaactccacctcccaggttcaagtgattctcctgcctcagcctcctgagtagctgggattaaggcatgcaccaccactacacccagctaatttttgtatttttagtagagatagggtttcaccatgttcgccaggctggtctccaactcctgacctcaggtgatccgcctgccttggcctcccaaagtgctgggataacaggcatgagccactgcgcccagctgattatggccattcttgagagtgtaaggtgttatacaaatggcaaaaaatgctcaacatcactaatgatcaggaaaatgcaaatcaaaaccacaatgtgatctctttttatattttatcaatcattgtagagtgtttggagctgagggggtgcctggtaatatgagctaatagagccatctagtagaaaaggacagactcttttgtaatcttttgatttaataaagtgtagggattaagagcccagatactgaaactggggtatctggagttgggtctgagttgtgcccctaatctgtgtgctcccagaaagagtaacttctctgtgcctcagttttcttatcaggaaaataacttttcaaggccaccgtgaagattagatgatttaacacctgcaaaatttttataagttgcacataatagatgttcaataaacattagttatcattatatgacttaatggagatttttattatatatatttcattatattatgtatatagcatgaattacatttatatatatattccatttagccaattctctatcattagactttattgctatttctaattatttgcaacattagaaatccttatagcaagttatttgcataaattaatgattgaggactccattgaaatgtttttgtattttttagtatctgtggattgagaaagtaccttaccaaaagctcctatgaatccagaatcaattttaaatgaatttatattttataattcaaaacaatctatatatatttgaaaaacagtagtgcctgtttatccaggataccaacaatggctagtgagtgtcttagtttgggctgctataacaaataccatagattgagcagattaatcaataagcatatatttctcacagttctggaggctgaaagtccaagatcagggtgccaacatggccaggttcttggaaagggctctcttcctgcttccagtttacagcaatgtgtatgtggacctccccatatggcctttccttgatgcgctctggtctctcttcctctttttataaagacattcatctcattatgggggacctaccctcatgacctcatctagatctaattacctcccaaaggccacctccgaataccatcacattggggattagggattcaacatatgaatttgggaggggacacaaacattcattgtatagcagtgtgcatatgaattttctcagatccttgtcaataactctggtccacaggtggggaaccattgctttattgtaaatgacttaatttaagggaaggatctcagctcaaaactctctttccatctggatttccaccaatacataggaggattaagggaaaataacatatacttctactccttgtggattattcagaaactgttctttgaatgtctggcttagcagaatgtgttaagtaaagtgagtttgactggtgggtagattgaagggggcaggaggaggggagggagaaaaagaggtgactttggagcatggcgtgtactctgagggagggtggacaagggcaggcactgcaattggccatctggtgtaagaagagtgcagcaaaaagacacagggcttctgaagggtggcgaagggccagaggaggtgggcaggagctgggcacaggaaggcttgctgggagggatcagatgtaacataaacaggaatgtggaggatgtttctgagggatgggcctttatgcagccaaacgtttttgcataggctttttaggggaatgagtatattttggtttcaagaataagaatgagggctgggcacgtggctcatgcctgtaatcccagcactttgggagccagaggcgggcagaccacaaggtcaggaggtcaagaccagcctggccaacatggtgaaaacccatctctacgaaaaatacaaaaattagccgggcgtggtggtgcgcacctgtagtcccagctgcttgggaggctgaggcaggagaattgcttgaacccaggagacagaggttgcagtaagccgagattgcgccactgtactctagcctggcaaccagagcaagactccatcaaaaaaaaaaaaaaaaaaaaaaaaagaataggaatgaaagaaatagtagtaaaagatgatgccaaaaaaatgctgtagtacaggtgagaaaatgtaccgccttctaagaaattccattcttattggggttaaagtatcatgtgttgccacagcaactgccaagaaaaatccgttttaagaaaggtgctctgctgcagagctcatgtactttgattctgaagtataaagtgaaaatgtagaaataactgcaattttcttaacaatcttaaaaatattcatttcccgcctttcttcaatatcatttcctcttcactttctttattctaactggcgtcctctcaaactaagcgtgcagcgcaataggagtcctccattccctgttcataggaaccgttccaccgcaagggagtgaagcctgctgcttaacaggcctgggactccaaggcaagcgggtggctggtgcaggaagcagttgccgacctctgttgtttgaaggtggcatgaactagtttctggaaagggttatattttcaggaccattttctgatcctgtggagaaaaaggtggctttagcatgagtgaatggttcaaacctagcactttaattaggtttaggtgctctaaatccagcttcaggtagttcaaaagattctctgacaccaaaaagaaaacaaaggtctggtaagtctgcctctaaggattcacacacagaggaaagacagaaaatggataacatagtcaaaggccagaaaattactaataaactgtctgaatttgttcatgaatcaaagacttaaattctgaataagattgaggttgtcactggggtcgtaccatggcagcaaagactcagaagaggaactcggacagcgatccatcctaaagcacaaattattgcggaagccgggccaatagtgattggcaaagggaacctgatagaagaacaggcccttatcataaatgcttcctcggatagtatcactcttgacactggagatccagaaccaaaacctatgatcattggcaccaataatgtgtttaaagttggcgtcattcccaagccatggagatgggagataataatgtcattgaattaaaagtgtatgtaggcagaaatctaatattgacaagtggctgtctcactggcgcttgttgcaacctaaacacttttgaagtcatcccggagaatacggtgatctatggtgcagactgcctttgttgggtgcaggctgagcgaccgcagcctcagacactacagctggatttctcgatgaaaatcttgccaaattaccaccacctaaagaagactacgaaaggaagctcaactccagtaaagaactaagaacagtacatgacatgaagataacattttgtctttgactgctgtcttttgaatgggccacagtgtttatgtactcttagcagctcacagaataatacatgttgactttattttgtaaaattgggttgagaggaaagtaatggattttcattgtaactgtcctttataattcatgtaaaatgtattattttcctttatccttgcttcttttctgataatttacagatttagcttttcttttgttatataaactgctagccacaaattttagttatgtaaaagactacccattacaagaaaggacatattgttatgtatttatattctggcataagctaaactgaataaaaatactggtaacaggaaaaaaaaaagattgaggttgtgatgtaaaataaacacatgtgaatattaaaattttggacagtattttgcatataagcaataccctttacttcctgatggagatggaaaagctaaaaccatattacagagctcctattaataaatgtggccttgggaggtactcatttagaatttctcaagacacatgtagcggagattttattcagcagcattcattccagcatttactccagcattattcaccagttttctggtaactggaatctacccctctcccattctctgacccacccaagggtcaggggtagagtatgtgacgggaccctaaggcaatcatcacgtcgcattatctggagccataactattgagggcctggtaacatgatccaagtccaggtaaccagagtcactgacagtcaaaggatgcagactctctcatccactggactttccccattgatgtcattctggaattgtgacaaccatcttgctaccacagagtaagaagtgaactgagggttttggcaatccaggggaagaattgagaagtggagaaaaataaactaagccctttatcaatctgtacctagagttagccctgtctttggatttttcagtttgggttagattttctgtcacttgcaacccaaacggtctgaattgaaacaacatagaatatgcaaaatattcacttacatttatgcgtgttgcatctgttagaccaggggtcaacaaacttcagcctgcagaccaaatttgggacactgcttgtttttgtaaataaagttttactggaacacagccatgctcatttgtttacttattgtctgtgattgctttctcatgacaatggcagtattgagtagtcttgacagagaccttatagctcacaaagccctgaaacatttgttatctggccctttatagaaagttggctgacccctgtgactagaccaagctccactaggtagggactgtgttcattttgctgactgctatggcctcagcatttagcatggtgcctggcatatggtagcaactcaatacaataaatatttgctgatgaatgaacgaatcacacagagcttacaacctttggtgttaagtcagtctttgtctcaaaatgacaaggtcttcggaatgtctacagtaaactcatcacacatgctctccctaaagacaaagagaagattctgtcatctcagtattgcagttcttaatcagcacagtggctattaataagtaggctggcttcaaagctgagaaagtcggaggcaaacaccagggcctacggggctgctgagatcaaagaggatcttagagattcaccccgaaggaggggagttggtttcatcatgctctttcctcctctgtgcttctccagtttactcactatcagactttttatatatggttgagatagtcaatgactcatgcctcttttcttctaaaaccaaatgccagctcctttcttgctagaatatataattttggtctcatttctaatgtttttcttgttaataataacattcctaatattttttctttccttaggttgatatatactatgaatactccattcttttaaagaagagctggtacaggtcctaaagcagtttgagcagtacagcaattctacaggcatgggatgagaaaggctgaatgtggaaagtctggacaggtacatgttgaagaacgtgaatatttggaggaccaagtttaaacaagttggaaggaagcaccttctctatgttgcaaggtacatccctgaaagcgtttggggaaaacctgggggagggatagggtgtttttcacttctgtttacaatgtctgactttcctctcagaaagagggtgactaggcctttttggttggggctggacttcctaaaaaaggtagttttcatcaacaaaggaccaaaaccccaaccaaagggtaggtgagactcttgaggtttataactgactttgttaataaaagacccaagaaaacctatagaataaggctgatactcagtgaggctgatgggggttttggagtctccctgatatttacaatttatacatagaagtaaggttggagcactggacacatagcaaatgcttagtaaatattgttttaatgagtaaaaggctgaacaaagttgttgttgaataggtaggtggcaccttgaaattatggaaggtagtaaaggttatgtcaacaaatttagattgaatgtagtaaaaaatagaaaaagcaaagaaaaccccacattatgaacaccttatatgtgccagatactgtattaagcaattgctgcataatcttttacatactgtgatgattctatttaattcttacatacaatttggaagacagacattatctactcactccatagagaaggaaacaggtacacagtgcgtaactgctagaaccacgattgaaacctgacatctaagcctgtactgtgcccatttattactgggaggtggagaagggaataggattgatctggaaatattgtgatggaatctcaggagaggagattctgggattcaggggggcagctgggagctgctggagtgatctaggaaagtgaggaactcctagtctgatctgaggtgatggctatgggaaggtcataaaatagaagctgattaattacctgtctcatagaatagaagcaagagatgagttgtatgagaatatatgcttcagccatgtgcctagaagaagggtgatgttcctgcagagacaaggcaatgggtacagtacagggagttggtctgggtgtaagcaggacacaaggtatgtttgggggtttgcatttacttagtttgaggagcagaggaaacattcataaggaaatatgcgagtagagctcaggagaaaagcaggactagaggcccaagaatcacaggccagaagaagaagctgtagcctcgggaatggaagagctctctgaaggggaaaggggagaacaggaatgtcccaggagccaaggctcatctataagggacttccacatttaggatgtagaagaaggaagcagaagcagggaatgaccagaaatggccccagagatgagacgaaagttaggagagcggggagcaagcctttaggtttcacaagggaaggagggaaagtaggtgttaggtgctgccaagatcaaggaaaataagcagaagaccaggccatttcagttgcagtgagccaagatcacgccactgcactccagcctgggtgacagagcgagactctgtctcaaaaaaaaaaaaaaaaaaaaaaaaaatatcagaccatttctatcccctgccttgaatatcaccaccgcataggaaatagaatggtctagatagcagattaatcacgacggattttggtgatcaacagtgctacagataaggggagtttaagaagaaattaatttgttgataaacatatagtttcctattttaaagcaaaacttaaaagatccacatctaaccttcagttaaatatcgttcaaaatatctgatttagacagagagttctgacctggtttgagggcatttttcaaaagaggcaagctacgactgctctttcttttctgcatatttaaactcttgacaattataaataatctaaacctctccctcaaagtaccaattatctccttatgtttgagaaggcatgtcttgccagatatggtattctatacaaaacacaaaataggaagacaaaggcagccgttgtcccaccggtgcaccccggatttacttaggcagctcgatgaacgctaatgaggattttgtgcatgaatctcccaccttccagctaaagggaactgagaccccacaacctcacagcagaacatttcttaacaccattgtaaacactgactccattcaggagttgttcacctttacacagcagagagaaaagaattttttgttcaattaaaacttagggagtgtgacgtcatcaaaatacttcctttaggctttctgaaagaaaaaagcttatactttttacacgagaagtaaaaaggagcttcagaaatacataactgacatataataggccaggaagggaacaggagacatcagtaactcctatgtgggataatggaggccatcacagaggtgatgagatttgactgggacattgaagaatgagtaggaactttcaagatggatgagaggaagaaaaaactgctagctgaggaaagggcaggaagcatagaggtgactgtgtgtggcatgcttagggactgtcacagggtagagtatgggtggaggtcatggggtgggcaggggataagtgagataggtggagacaaggtggttaggactttgaagcttatgccaaggtacctgggctttattctgaagacaatggaaaaactaactcaaggtttctgattggagactaatataccttgatttctccttccttccttccttccttccttccttctttccttccctccctccctccttccttcctcttttttgttttctttcttttttcttttctttttctccttccttccttcctccctccttctcttttctctctttctttcttcctttctttctctttctttctttttctctctcgttccttcctccctccctcccttccttccttccttcctccctccctcccttcctttctccctcccaccctccctccttctttctttctttctctctctctcttctctctctccttccttccttccttccttccttccttccttccttccttccttccttccttccttcttcccttcttcctttcttctctttttttcttctcgtttctttttcagacaggttctcactctgttgcccaggttggacagcagtgatgcaaccacagctcactgcagcctccaccttctggtcttaggtgatcctcccacctcaacctcccaagtagctgggactacaggcgtgtaccaccatgccttgctaatttttgtatttttttttgtagaaacaaggtttttgccatgttgcccagcccaggctgggcaatctacctgcttgaggtgagctcaagcaatccacccactttggcttcccacagcgccgcctggccataccttgatttctgttacaggaagagaaacctaatgtcaccatcctgcttctagttttttccttctccagctgattctccacactgttgcatgtttctctaaaatgcagatctgatcatctcaccccaaccccactcccatataaaaacacttctgtgatttctttcatctgtagattaaagacaacctcctttgcatggatcatctaagaaccttctcatatggtcttagactaattttccaggaccttgtgctccagtaatgacttggcattttccccaaaagtcccatgtcatgttgtgactcatgcctttgcacatgctgttttgtgctcctctgcgcccttccttcctctgaactggctagagaaccactctccattcttacataggaccttctccaccacaccctcccacagccttctagtcacggtaaccaacccttccactaaaatgccttggtattatgttcatctaacagttactgattgacacttaaggggtgttttctatgtattaggcaccatagtgtactcttttgcatatattatatttcatttaatcttctacgaatgctatatggtactttcatggctgtttacataagaagaaataggcttatccatagtcacacagctacttggtacctgagtcaggacctgtacaaggtcttccttacccgagagcctccgcttgtacttcattatcagatactattataactattgatttgcacactgctttctcctattagactgtgggttccctgagagtaagttctatgttgaaccggagatcaacgttatttcaaaagtatataagattaaataattattcttttgaagtttgagaccattacatggactgtttttgccaatgtaaagacatttttgctaacctattatgtaggctggagtttgcatgaagcagatcatatacaaccacgtagacctgggctcacttcatcggcatttcatctgctctaggtgagatggagaaacggcagccagttagtagttcattttccatctttcaagagagattgacatctatattttttttacacagcagataaactggtaatgaatatatatatgtgtgtgtgtgtgtgtatatatatgtttatttatttattaaaaaattttttttgagatagggtctcactctgtcacccaggctagagtgcagtgacgcaatcatggctcactgcagcctcaacttcatgggctcaggtgatcctcccacctcggcctcctgagtagctgggaccacaggtgggcaccaccacgcctgactaagttctgtattttttgtagagactgggttttaccatgttgcccagcctggtggtaatgaatattaacttggcttggtccacttagacatacatgaaaggacaatttctgttagaaacacttacataagaatatgaaaaagataagtacactgttactgacttagataaaaccagtgcaaccttaagaaacagtactgggagagcaatagtcatgttagattgagcaagaggctgcatcttctaatctttttttcatgattattttcactagtgtgctctttcaggaatgtctctgtgcattctttataaaactgttgcccagatctttttttaaatcacatcaaaccaaaaaaggtcaaataaagagcaggaagattttgttctttccgttgaaggcatttctttaatattaaaaatgtactgaaatgtagaaatcatattctgatgatgtctgaaaagaattcatggtaaagagtaaaaagacaaagaaaaaagctctcaacaatcactggtggctgagggccgcagtatcctcattgggccagcttttttctttacttcaaatggcagaaaaaattcacgatttacaattagaaaaaaaatcctaaacgtgtgtggatattacgatgaatgccactcttcatgtttattggcccacatggtaaaacacattatggtgaaaattccaacttcatctataagtgaaaacaaacagaaagggcatcttttcttattcaaatagagttccagagggtgtgtttttgctttatttccaaccataagaggctcctatctgaaggatctttctgtgtagcttgagtgcccaagttggcaacttaggtctctataacaatttcattccctctctttatcttgaacacgtatttaaaactgatgttggcagcagaaaggctaagattttagggataagggtactattttatcttgtatgatgttaacttttttcatccagctttgagaaaattctttttttctccttcattttgatgaactgaattaatcttgcttctttatgtccttaggaagctttaaaatactaagacaggtgaaaccaagtccctgtactaaaggtggcttatgtgatctttgtcatatccagtaatcttctgtgatctttgtcatatccagtaattttggaaataaaagggttgttgtattgtaaacttaggttaatatatactttaaatgtcccttatggcaaagtagatgtttgatggaatgagaactttcaggagacttgcctgagatttttttagtctacacatggtatagctcaacttagtttgtggatcacatatggcaaccataagaagtctgagagaaaaaggggggcggccagtagaaggtaggagctccctatatttcttaaactattctgagccaattggatggtagagactggtgggtagttaggtgagaaagtgctaggatggtggagctgcctaggaaacccagcctgcaacccagcacagaactagacatctgcattttatgccagcttcctcctttgcctccctgaacaatgctgaatgcctaagagttgaccagaagtagcctctgttctgtgcagaacacaaaggaggaatcaaaccctgtcttcaaggaagtaacagttttggggggaagcaaaattaacctataaacataatacaaggccgaggcgggcagatcacgaggtcaggagatcgggaccatcttggctaacacggtgaaaccctgtttctaccaaaaatacaaaaacttagccaggcgtggtggcgtgcgcctgtagtcccagctactcggcaggctgaggcaggagaatggcctgaacccgggaggcggagcttgcagtgagccgagatcgtgctactgcactccagcctgggcgacagagcaagactctgtctcaaaaaaataaataaataaaaaataaaataaacattatacatccagctacagggaaactcagtataacagacatttggggaaagaaaaagatctttggccatggcattgcttgggaaggtctgtgggaggtgagttttgagctgtgctcccaaagctgagtagcagctgaacaggcagaagtttggcaaaaggaaattccaggtgaaggaaaaaccatgagccaaggcgaaaatgagtgtggctggtgtgagagctgagcacccacacttggctgagggcttgacaggagatgcttgggaatgcttagaaataatattggatagtccattaattaagttttaagagaacttaaaagtctggcagagagatccaataagtgagtgtgaggcagttgtttttctgagcaggggaataacatgatgacaatggtattttaggaagattgcccagatgtgacgcagctaggaagagaccattttgtccaaatccaaggtgattaagagtcaaagatgtccatggggagaacggagatgatgaatacaactaaagtgacattttggaggtagaaataacatgacttggtgatgaaatagttataagatgtgaccgatgcagcaggtagagcccaagacaatgaatgccaaggtttccagcagtcttcctctcaatcctgataacaccatcaaggacacagcatccccactgaactatctctgttacctttggtttcctggtttccacttgtcttagtcagctcaggctgctataacaaaacactgtggattgggtggcttaaacaacaaacatttattcctcatagttctagaggctgggaaatccaagatcagggtaccagcatggtctggtttaggtgagggctctcctcctgacttgcagatggctgcctccttactgtatcctcacatggcagagacagtgcaatatttctcctatgtctctttttgtaagggcaataatctcaccatgaaggccctactctcatgacctaattaccttccaaaggccccatctccgataccatcacactggtgctcagagcttcaatattttggcggggtgagaggcattaacattcagcccataacaccacctcaattttaatgccttttatttccacaccagagatttttttcacccccactttgctgtgtcactggcctcctttccattggcaagcctagccctacaccaaactgctgagacaatgcaggtcaggacaggaggtacattaagagcctcagtccatcagctgcagacaactgaattcttcttgctattgcagacccagtatcaggggcctcaaggccaactcaagggtgtgcttcattaacccaggtcatatgcatgggtttctgccattccctcctgcctactgctctaggtctctgctagaattagagcacagggcagatgaaagacaagcctaggatactgcgcgaggttctgtggaacagaactttctcttttcttctgatatgagcctggaaacataggctcaggaactgatagcaggtatcttgcaaccatgaaaaggacaatttgtggagaatggagccaacaataagggaacagagttaaaaaatggagagagaataattggcttttggtcacataatttgagctattggattaagcctcccctgaagccaatgctacttctcagttgacatgaagcaacatattcttcttattggttaagccatttgttcttcaaccaattatttctaataaattatttgactggggctgagattccctgccaaggacctagactttgtaccctatgagctggccccagcagtcccccagcaaggtagtaagggccactcgatttaaactctgccacaccctactggctggactggattgctttgggtactgacacctgccccagctcccaaaccaacttccacatctccaaataccttgcctacctcactgttcatctgcatttcaactctgatcactcaaaacttgcctactttctgaattaatgagttagtttccttgtgtagtctcttggtgacttaacctacaatttatacacaaaatcatatgttgccaggttttttgggccaaatccgaactctgggagctccctgacacctgcatgctttatccccaggctaccgcctgttgctacagaaagtaaacaacaataataaaacacacacatgctgtttcaacagggtcatctagaaattcatgctatttaacctcaatggaccttctccattgctggtcaacctttaactgctctctgttttacatagtgtaggggcctttttcatacaatgtctacctcatgggacacccacatacttagtagccaacattactgacgatctgctgatgactgaccctggtgtaatctagggttcattggtcccttgtgctgggtgaagcctttggtaatacttagggagcaccagagaaaataactttacacaaagacaaaaagtttagttatttgctgtatgtcttaattgatgcaagccatcaaagtaggaattgcagagaacaaggtataaatcaataaaataagtaaatggaagtgattgaaggacagagccactttaaagcaagtgtcgctcaatttcctgaaaacataacgaaattgctttgcaaaagaaatcataatggtttgcttttaatttttcctaaagagcactaataacaaataatggaaagttcaattgataattaaagaaaaaaaaaacacttcacttttgagcattcatgaggcagtattcttttcaaattattatactctggcaaggcatactcaaggtacttggttcctttgtactctttccctctgtatttcaggttttatatgaatgaaacacaatgagtaattccttctctttggatccttcaggatattatttaaacactggcatctggtctaagggaaacttaatgctaagtcagaggagtatttgaaaaatagtttacatctggttttgtactacccatccctggaagtatgcagggagggtggaggaaatgagcacattgctggctctctgggctgtggtgctggtggggctgggtcttttggtgtaatgcataccacagcattcccttttataaagtgagggattagtgccaccttctttgtagcaatgtcgtgacctctataatgcttcttaaattgaggacaatgatggacccaccaagccttaacacatgatttaaatctgatctgacagtacttaaacccagaactccagagggctaatggttgaacaagcttgggagaatgtccagggaacaaaatgtagaagcccgatgaattacggaggaatcacaactccagggcaatggaggggggagtaaaatgacatattctgagttggtatcttttataggattgactaaaactgtggtcccactataatgtgctagaaagcaaaaaaatatatattattttcactcgtacatctataatttaagaaggatatgagttttaacaacatttgtactcttacacacacacacacacacacacacacaaaacctatcgagaggaatctctcatagaggctaaaaattagaagcaataatattttagggtggtcattaattttaggtacaggtatatagtattttaaatttctcacatttagacaaacttagaaacctgattaaaatcagtttgtgatatttgtatactgaggataaacgtaacttgtagaaccatgaagagcaaaacactcaataatgagtcacagcaggacccatggaagctcacctagcagtgacgtctgacctgcagcagccactgtgctcagagggaggccgacgactgcgccactcccttgggcactttttttttttttttcgagactgagtctcgctgtgtcacccaggatggagtgcagtggcgcagtctccactcactgcaacctcagcctcccagattcaagtgattctcctggttcagcctcccaagtagctgggattacaagtgcccaccaccatgcctggataattttcgtatttttagtagagatggttttcgccatgttggccaggctggtctcgaactcctgacctcaagtgatccgcccacctcagcctctcaaagtgctgggattccaggcatgagccactgcgcccggcctccttgggcactattcttaggggacctactccatttcaataaactataagttggtgacagggccaatgtttattttgtttttggcttgtaaacaattcacacatcgaaaacatctctgccctgctccttcactaatccccagggccctccaggtatgtcaagctgttcaatatacacgttaagcctttggcattaagtcaggaactttctacccacatccaagagaccttattacccctgtgacttgtatttctgcatttttcttttcctaactcagatcccccacctggaagatcttctgtttgtagttaagtactaaaagtctatataattcataaccgcgagggcagagaaaactctaaaaccacctgcctgtatgtggctttcgggaagcaacattcctgtgatcacacaagctgaaaaggaataaaagtgctctctcacaacagcaccaagttgaggtactttcccttctttcctgggatggaacaagaagtgtttcctttcttttccatgtttgttagaatttggatggtttctattctctcaactcagtgttactgattggctggaagagttcattccacccttttagccaaagtcacttttgaacaggctgttttcgactgccaggcaagcaccacacaaaattggcatgagatgcttttctttggttccattggcctctcctttctctctccatcactccacttacagaatcttgccctccccatctaatgccccatattgtcacattttctcccagctaactttcttttggtaaaatctctaatgtgtgacaatttcaacgggtaacttgcattagaaagcctctgattgtcaagtaaagttctagtctcgcagtgaatttttttggcccccatcagttcagttttcggcaggtgggcaggggaaacattttgggagagcggcagctggcccttctctcctcactgaaatcacactaccagtttgacttcgcctggtgttaagattaattcttttactactgcctattactgactcatttctctttccttttgaaaatatgttatgacatcgagccccaaattcaagtataaaactagatttggtggcaagaaattctcttctaaggaatagttttagactttagagtctgatgagccagactgagaagcatgtgttaccacaggggtataaacgtagggttggagtttgaaaaagggtatgtatagcctggcgataacaatttgagaatcaccacaataaatgagacctgaagacaatggggatagatgatatcattgagggagagagaatgtatagctgggaaagaagtagggaatagataccagaaaacagagattatttactgtatggggaaggcctaaaatcagaagacaatagaagagattgagaagctgctgtctaaaaaagaagaaaaggccgggtacggtggctcatgcctgtaatcccagcactttggggggccaaggcgggtggatcacgaggtcaggagatcgagaccatcctggctaacacggtgaaaccctgtctctactaaaaatacaaaaaattatccaggcatggtggagggcacctgtagtcccagctactcaggaggctgaggcagaagaatggcgtgaacccgggaggcggaggttgcggtgagccgagatcgcgccactgcactccagcctgggcgacagagcgagacttcgtcttgaaaaaaaaaaaaaaaaagagagaaaaatagaattatgctggggtaagaagtcaatgcaaattaaccttgggaatctcttctacttggctatgagctccttcaggaaaaagactctcttatttatcttacagtcgaaggctaatggctcctggcacatagtaggtgctgaataaatgtttgctgaataagtgccttctctttttaaaaataacctgtttgtcccttcagtggggcatatgttctttgaggtttttttgtttttgttgttgttgttgttttttttttaactgatgcttaaaagagggtctgaaacttttgtgttctgtcattttcaaaataccctctaattataccctaatagttatataggtatcatagctagaatttcccaacaggcaggatttcaactcactgtttgggtcctgttactttctgtatatttttataactcagttgtaactaaaaaaaaaaaccctcataattgaaattctcaagaacttttctatttactggcagtatattaatatacacaaatgcaaacacatttattattctttgtcccctatttaaaaactgaataacaacaagtgtcaacttttaaaacccatcatgcattcttcaggcttcaccttaaccccaccttcctctagacttagaagctccaaaatatcacagctcacagagaaatagagcctgcaacaattaaccaacttaattttcacagatgctaccatcaatcaatacatattacatattaattttcacatatgctacaatcagtttttcacaagcttcactaaaaaggtcagtatacaccgaaccaaaaatttagcagttttaaggattaatgaaaactaagtagatactacttcagaattatgaatctgattgtcagccaactcagggtctaaaaccttatggaatgtattactactgtatttactgatcatgcagttgaatgcctgctttgtacaaagcactgtggtagtgggcggggggggcggggcagaccaagactaagctcagtacagataactggggaatcaactcacactacagtcgttgaaaaaataacccattattataaagaaatgcatcaaaacaacataatagattatacaaagaatataaatatataaatatccactattatttctgaaaggaaacttatttctcagatgtctgttagggttgtttggctgagaaggggggtgggtaaaacaaatagtacgcagctggtggaaagagaaggactataagcaggtggcaaaagggaaaacagtagtcactgggggtcaggaatctgaaggtcataccacagggtgacatcacagaaaagagagccctgactacactttaagagctcccgaaggggaaattgggaggtagcatccataaggggagaagtacccccatgtacagggaatgctacatctcagaaaagaggatcttgcactgtgtctacgggagcccatgatgagtgtaagagaaaagggtcaaaaagtctctttgtgactgatgtacggacaagaagaatggtgtttctatcctgcatatgcaagaggacttggaggctttctgtctctcattggtacaaactccctgaaccaactggagataaactctgttcatcttctatgtggtgaaagttgactgtggaacaaacagacatactatatacaccaacacacaacatatatatgtgtgtgtatgtatatatatagtatgtatgtgtgtatgtacatatatagtatgtgtgtgtatgtatatttatagtacttgtgtgtgtatgtgtgtgtgtattcctactataatacattcactgccctcagaggaaccttagtctagtggaaatgacaaaatatgtccacaagtaattagaatgaaggtgatgtgtctgaactcaacaaaaggtagctattagaaatcctcaggaagcaaactctttcagtgaaacttaggaattctcattaaagataagaaaaaaacaaggacacatactatcactggtactacttgatatggaactggaggcctcacctgtgcaatatgacaaacattaataaataaggatgaaatacaggaaggaagatacaaacattaaatctgtttaggaatgatacaattgcctacttagaaaatttaagaaatcaactgaaagatcattagaagtaatgttggtaagagctctggtgagacaactgtaatactcctaaataccagaattatccatttagaaaaaacaagggaaacccatgaaaagaaaatataccataatatatttgggaataagtttaataagaaatgtacaacacatccatccatattaggatagatttcagttgtaatgaaaaaactaatgaaatgcaaagagatgtaaagttcctgaatgggaagactcaatatcgcaaagatgtcaattgtcctgagactaattcataaattcaatacagtccccataagacaatcagtgggattaaaaaaaaatgaactctacaatcttagcccaagattcatgtgaaggagaaaatgctgaagaataactaagacaatttagtttaaatttttaaaaagatgatgagaggagtcttctctttatagatgatatttactacatattagtactcttcagaaaggttttgcttgtaatacctgattgaatcctcacaacaaattcataaggtgagtaccactattaattcattttcaagatagggaaactgaggcaaatcaagcaagtaacttgcttaacgttccatagcaagtaagtggaagtggcagagctgagatctgaagccaggcactgtggctctgaagctcatgctcttaagtaccctaatagatggctcatattggcacaggaaatcgataaatgggaaagaagagaaagtcccagattcacacacatatcaaaaatttgatttttgaaaatgatggcatttccaaaaaatgggagaaatatatctcagtcaatacatggtattagtattaataactggctatctatttggaaaggaaactagtaaaatccctgtattagttttttatcattgctgtaacaaattacccaaagttagcagcttaaaacaacacagatttattccctcacagttttgtaggttggaagtttgagggagctcagctggatcctcagctctgggtatcacaaggtcaaaatcaaggtgtcagctggcctgggctcttatctggaggctctgggggagaattcacttctaagctcatttgggttgttggcagaattcacttccttggcactacagggctgaggttcccatttcctggctggctgtgagctgcgcgtccctctcatctccttgcgactgctattcctcatcatgttgtcctctccctctttaaagtggcaatggcgcaatggttcttaggcttcaaatctctctagcccccccgccctcttttgccacatttgccatgttctcctgcctccagctgcagaaagttctcggcccttagtggtcatgtgtctggatcagccccaccacttggataatctgggatcatctgccttttttaaggttacttattagtaaccttgattatatctgcaaaatctcttgcaatgcaatgtgcatagtcacagatgccagggactggggtatggacctccttcaggggccattctgtctaccccaatccttctcccacataatatatcccacataacataacaaatttgaggtagattaaagagttaaatgtatgaaacgaaactctcaaaagtataagaaaataaaagagaatatatttcataatctaggttagagagtaccttcctaagcaagcttggaaaccatagggaaaaagatagaaggtaatcttctcaaaaaattaaaatattgaataaaaaattaaaagataagcaattctgaattctgagaaagtatttgcaacttatctaactaacaaatgattaacatacagactatgtaaaaaataaactttcttttttttggagttggagtgtcactccatcacccaagctggagtatagtggcacaatcttggctcactgcaacctccacctcctgggttcaagccattctcctgcctcagtctcccgagtagctgggattacaggcgtgcgccaccaagcccagctaatttttatatttttagtagagacagggtttcaccatgttagtcaggttggtctcctgacctcaggcaatccgctcgcctcagcctcccaaagtgctgggattacagatgtgagccaccatgcccaaccaaaaaataaacttctatagatcaaattagaaaaacaaatcaatagaaacaattagcaataaatgtgatcaagcaattcatggaaatgcaaatactttccactcttagtaatgaatgattagataatccattcccaggtctgtttcaaaatgttaggcaaggcagggaagaattatggggtcaagatcctggagatgacataaagcagaagaatttgtaaagctggcatgtggggacatttttacatggtggcctttgccaattctagagtggttggtgagaggctgagaagctgaacaaatctttcttttaacagtttcacacacaaaaaatccaaagagacaaaaattgcagtccagggctcactcaggaggagtgtctgataaaatccctatactttgggtggattccaaagggctacactctaggagtaggagtgaattggaaataaaccagctctctccagaactgaagtttagcttcaagtcatctcaatctttgaaaataaattaaggctattcaagattacaagtgccactacctgtctatctagaaacaaatctaagttctctggaggaaattaacatcatcctaggtcttaaaattgtttctataaattttcatataaaatatctggcactcaatcaaaaataggcagactcacaagaagcaagacaacatgccaagagaaacaaaagacaatgaaacaagatccttgtgagctccagatcatggttacgagacttagactttacaagaaccaagacataggtccaacagaataagaaaaatgattgtgaattttgatatagaataagtaatttaaaaagaactaagtagaaagtctagctctggaaaatataataagcaaaattaagaatgagtttaacagtaggttagacacagctaaggagagaattagtgagctagagactgggtaaaaataaaatatccagaataaatacagacataggaaacagggctagaaggtctaatatatacataattgtatttccagaaggaagacagagagatagagttagacagaagtaaaagtagaaaaatctaaataccgtaactactaaaaaaagtatatctataattaattacaaatcttccaacaaagaaaagtctaggcccaggtggcttcatcagtgaactccaccacctatattacaggtgttcaccaccatgtccagctaatttttgtatttttattagagatggggtttcaccatattggccaggctggtctcgaatgcctgacctcaagtgatccacccacctcggcctcccaaagtgctgggattacaggtgtgagccaccatgctcggtaccccaaatattttaaaggaagaaagactatcaacttgatacaaattcttccagaaaacagagacagaataatttgttttatgaggccagcaaactttaacaccaacatccgatgagaatattataataaaagaaaactataggccaatatccctgagaaacatagatgcaaaaatcctaaacaaaatattagtagaccaaaatccatctacaggttaaaaaaaagggataacaaatgggattaattccatgaatgcaatattattatattattaatattattatatcaataacattagaaaataaacctgtaaattttactgcattcactgaataagaaacaaaattcatatgattacttcaaaagatggagaaaaggcatttaagaaaattcaacatctacttgtgattttaaaaatggaaaatgaactcttactaagaatagaaagaaaattccttactgtgatgaaggcagtctatacaaaatcaattgtatttcagtatgtcagcaacaaactgtgagaaaatgcaatttttaaaaatgccatttaaggccaggcgcagtggttcacgtagcactgcacactctgggaagccaggggtgggcagatcacttgaggtcaggagtttgagaccagtgtggccaacatggtgaaaccccatctctactaaaaatacaaaaattagccaggtatggtagcatgtgccagctacttgggaggctgaggcaggggaatcgcttgagcccaggaggcggaggtttcagtgagccaagatcatgccactgcactccagcctgggtgaaagagtgagactctgtcttaaaagaaaaaaaaaaaaaagaagccattaaaaatagcattataatgtgttaaataaataggagcaaatcctaccacccagaagatgttaaagatatcttcatagaaaatgtaaaacagaaaaattaattaatgtttaaataaagtagagggatatactatgttcacagtaatgactggaagacattagaaattgacaaaccaagtctaaaatttatatagaaatcagaagaacctaccactgaaatgtaaacttcacaagggcaaagattttcattcggtttgttcagcaacgtatatccaggccatatagtaggtgctcagtaaatgtttggtgaattgaagtttcaaagtgtctaaagagtttacagtaagagttcacgctgagcttcattcagttaccatggcacattctgatataccatctcatttaccttcctgtttatgaaatcacacaaagcctcaaaatcttatatgctgaatggagcagttgggatcattcggtttagtttttcattctttcttcagggcattcaggcaaataaaatcttaagctgaagagtagaaaaataagataaattgctgctctggtttcaactgggggagcctggcctggagcaccaccccttggattatcaaccctaagaaacaggacaagcatctgaacatgatatctgtgcccttcccaacatggctgctacctaactgagctgagaagagccccccaaataagtttgtcagggccaagacaaacagattgcaaattccttcttattaataataaaaaactggacaatctggctgtcagcgtgctctttacctcctatttcttctcaccattttagaataaacctgtctgtaaatctcacatacaaaacctaaaaaggatctttaaactatttattttcctttattataatagaagttcctagagtataaccacattttctatgctatttgtatatactgagagctaagtacgtattaagttgctggattcaaaacaaactttgtacttaataaaatttaaatgatgccaattacattatattctttactaattcttagtttttcatttaattcaataagttacatgcatttgaacactttctaactatatattttttctactggaactatgccttctaattttgtatataaatccaacaggatatctacatggaacatacatttaaatggccttttaaacttctgaattgtctgttgcattgaaaaatcaactttctttccttgtttctagtttaaactgacgtacatctggtacctttaaaacatctctacttcggctgggtgtggtggttcacgcctgtaatcccagcactttgggaggctgaggtgggtggatcacttgaggtcaggagttcgagaccagcctggccaacagggtgaaaccaggtctctattaaaaatacaaaaattagccaggtgtggtggcacacacctgtaatctcagctactcaggaggctgaggcatgagaatagcttgaacccgggaggcagaggctgcagtgagccaagattgcgccactgcactccagcctgggagacagaacaagacctttatctccaaaaaagataaataaataaataaatctctgctttttcatttgtttgccaataaacaattgcaattgcttctacctcaaaatagccctttctcaacagaaaaagggctggactatagtaaaaaaaaggaactgcaagttaagtggcccctcggaatgtttgatacgtttttccaaacatgacaagcacaatcagtagtcatcaaacatttctctctgctgactcaaccccaccctctttttaacatcactgtgttgatctctactttctctttctacctgttcactgaattctatgaattcagtgcttagtagctgtcagaacaggaagccttgatagaatactgtgggaacataaacatatatattcctttctatcttcctgggaaactatatttgatcacccaggttaatacttgataattctattctgcttgcccaccaattttaaaaggtgggatagaacacatcttggttttaagtttcttctattttattctttaagagcctccataatttacttgtttggagtaaatcatatgtcttgatcgaaaacataatttttaataaggctaaaatgaaagccaaaactgtcttaaaaattaaacgaaaagacatgagactataccacaacattactccattctaagaatagaagatgagacccagccccaaggcaggcaaagcctggctttgaaccctccagtcccaggtcagagatctgtgtgctcctgcggccctccccgtggtcttcgtcatccgtcagtattcattgcagggacgaagagccacttcaacaatgtagaaaatgctttatggaaaaacagctgcagtgatgcagtcggtgctttgctgacacgtggatttgatatgtcagcaaagcacaggattaaaaacatgcagcaagcacatagaggatcctgcctcttctctcctcccgcagcacactcagcccagtgaggttaaaaacaaagagaatctcaagaaagcaaagatgaaacagagcacgttaacaccagaagagtgctttaagtgatcctttaaaaatggcattgcaatcattgtgtatggtttttagtgagggttttgggtacaagtgtttgacttgctttggcgctttgccaccaaaatctattagaataactgatttataagaaatattttgataagatgtgtatttaataaaaatactaatgtccttgacactgtggttcaagcttttttttttttttttttttttttttttttttttttttttttcagaaaacagaggcaagtgttcaaactgtcacggagaataacatgtggccaaaattacatgtggttctatctctcataacaagtcttagaatgatgcatcataccagctgtctgggaacaaatgtattttgttggcatgggaacaaaagaattagtctgaattttgtaattaaactgtggttattaaaattactcgaaacaaaccagaataataaccattaaacatgaaaagtcaataaaagtctttgaattacatttctgttgcaattcctgttttcataacgtgctttgggatgaaacatagctttgagttgttagtacttttaaatagacttcactgcagatgagttagccaacagcagctaagactgtgaagttttaaaatcctttatggaaaatgaaaattaaaggcttggaaatctgtagaagaccaattctttttaacaattgtcacaattattgcacaattgattttctgtctctatagcatcttcttctttaaggctgcctgtgactccatagatttgttggttacccttgatgatgactgaggtggtttaaagataagcagtgctatccactgaaagctttaagtttattgattttggttctcctaataaccatgctactcctggatagatcactgggcattgtgggaggcaaatcaactctttgggaatacaaatgatactagttgtaacggtataacaggcggaaggagctaaggagcttccagagtcgtctaatattacccgaaagctacttatactaaagggaccaagttttattctttaaaaacccagagacctaggaaggaatcagcagaatgctaagttcatctatagagaaaaatcaaggacttttttggtgtcttttctgctttggccttcttataggagagatttgaaagaaaaatctgtcttgttttagaggagagcagaaaggtgggtgccacgggcagggcactggcattttgctttctcttcatctttccctgacctgtgaatgctttttggtgctataatgtctgaggaatagctgagggcccagagaagccatgaatgatcctaccagatgaaatgaccaccccggatgaaaatgataaaagaatatctttaatatttgttttgataaaagtctagacaagaatacactgagaaaaagtcacttagaatatgtttaggaggcccaataccaagggcctgtgatcagtacccaagttcagcaacttttggaactcttcgtcctcaaagtccctgtggcctgtgatgctgctaattcttcctccctccttctctccatctgtcaccctccctctccctctttccatcccgtccttcttcctcccattaattcaccgagcaccattgggcctgatgctgggctaaacgctgggatacaaggataaacatgacacagtcccagctcaggtcccaccctcaaagtgtaccacctactgagggagtttgatggaaaaagctttaatgcggagggcggggaggtgcattttagtccgttctcacactgctataaagatactacccaagactgggtaatttataaacaaaggaggtttaattgactcacagttctgcatggctgggaggcctcagaaaacttacaatcatggcggaaggggaagcaggcaccttcttcacaaggcggcaggagacagagtgagtgagacaaaggggaagagcctcttataaaaccatcagatcttgtgagaactcactaacacaggaacagcatgggggaaactgcccgccatgatccagtcacctcccaccaggtctctccctcaacaccaggggattacaattcaagatgagatttgggtggggacacaaagtctaaccatatcagggggccacagaaagtgctgcaaaggcacagatagataaaagtgggacatcaggtgggcagggctgttttgaggataggggctccggaaagcaaaggccttacagagtgattcaattcaacaagcgctggtggatgccatgaagatgacagatcgggtccttaccctaaggggcataatgtctagtaggaaattctctttggttttcctgcctttaaattctcctggctctgctcttcctgcccattccttttcaatcctctttgcatcctcctctatcttctctggtcccttggctgtgaccctgcctaccaatctgctcatggccctcttatatccctctatgctcttctttgtcaatattatccacacattctgggcttctgctatatctgcatcaagacgactctgacatgcttaaagtcctagggctctttcttgacttctggattcagattttcatttaaatgcctccaaatgaatgtcctcctgctagcatctaggatgcaacatctaaaaaaatgatagtgtcattgtccactatataccagcttatcaatttaaaaaggcattattttcaacacattcctttcttccactctctaaatctctatattctgtgaatttttcctttttttaattttttttttttttttgagacaggatctctctctgtagcccaggctggagtacagtggtgcaatcttggctcactgcaacctctgcctccctggctcaagggatcctcctaccttagccttctgagtatctaggactacaggtgcacatcaccacacctggctaatatttttgcaattttttttttaagagacagggtttcaccatgttggccaggctggtctggaactcctgggctcaagcagcctgcttgtctcagcctcccaaagcgctgggattacaggcatgagtcaccacgccaggcctgaatttttcttttctttctttctttttttttgagatggagtctcactctgtcacacaggctggagtgcagtggtgtgatctcagctcactgcaacctctgctgcccgggttcaagcaattctcctgcctcagtctcctgagtagctgggattataggcacctgccaccgcgcccagctaatttttgtatttttagtagagacagggtttcaacatcttggtcaggctggccttgagctcctgatctcgtaatccacccgccccggcttcccaaagtgttgggattacaggcatgagccaccgcgcccagcctgaatttttgcttttaaatgcatcttcacatttaccctcttctttctaccccttttgacaatatccagctcaagccttccgtatttctcttgtgaccagtgatgtgaattttaggccataacctctgaattggtctcctttcatttcttgttcatcttccctgctggactaatctttgtaaaatataacctcagtcatctagcactccccagcaaagaaaaagtcccccattgctgacaactgctttctaacgaatgactgaactgctcagcattccatccagaattggctgctggtcctgacacacaacacagcgctcaataaagagtagacactcagtaacaaatgatccctcttccctttttttaatggatgaaatgaacaaaacgaactttctggtcttgttttcctcttcactgatatcacaccttctggccaagatgttactcaatgtcccttgaacactcggcatgttctgctcttcactctgccctctaactagaatgtccttcctctctgttaatgcccaggccagatgttcccttctccgctataaacaactataatcacacacgttgcatctctatgatgtttgatagtttttgaagtatttttacacactttatcttgttttgatgttcccaagaaccctgtgggaagatattttactaacattttactgattaggaatccattatccagaaaggttgagtggcttacccatgatcacatgattagtagtgacaaaggtggactgagaaccagcagcacttttcccactagatcacgacagtccttgaagcctcttctggtttctctccctgtgccttggtgagggtatctgggactctgcagcccacgagggaacctctttccccaccctgcaacccctaaacacacacaattaccatggagaccgtctttggtcactagtgtctctcctaaattagttgatgtgtctaggccttaaatatgaagttggttgctgcaaagctgtgatcgaaatgttaaagtgtgacttttagctattttaaaataatttatgagtcacttgtgcctgcacagtccagacctttaatgcttgcaaaaccagatgagacttacaactaaaccagctggctgcaaaaaaatactgagcagaaaaccaaagaggaccccgggggcaacccaagacagcaagacaaggtagaagccaggagccttcaagagaaggctggcagaatgctgattcctgccgaacagctttggaaggacccggctccccggagggctgcaagctcttgaaacaaccccaaattagcaagtgccacacactgcctaggcagtgggaccctaacctcttcctggttaaagatcctctccttccttcccataggatcagggaagacggaaggaaggaccagtgcttgcattctttctgcatattgtgattctgagcctccaagccatttagtaaaagaaccaacttccagctgggtgcggtggctcaggcctgtaataccagcactttggaaggccgaggcaggcagatcaccaggtcaggagctcgagaccagcctggccaatatggtgaaaccccgtctctactaaaatacaaaaattagccaggcatggtggtgggcgtctgtaatcccagctactcggaaggctgaggcaggtgaatcacttgaacccgggaagcagaggttgcagtgagccaagatagtgccactgcattcagcctaggcaacagagcgagactccatcattaaaaacaaaaacaaaaacaaaaacaaaaccaacttccattccacacctggggtctacattttatacacatcccatttactctatcagactgtaaactccttgagggcaaaatctataacttattcatcttcgtttcttctcagacctaacactgtttagcaaaatacacctgttaaaagaataaaatgttgagtaaaaaaagactgagtctcctgtgaaacactcagcattgtattttatttattagaacatctctaaagtattgtttttttctcactaatttgtttaataaaatatccttctgggaaactgagtgatcaatgtaattaaagctattcatactttcaaattttaagatagccagtttgaagcagggaattttgctctgtgtatgttaatatccacagattggtatgttagaatctgacattttttggtgtctttgttataaatacatgctttacacagtgttaagaataacaagaaaacttttagactatttattttcttccttttcttttctataatttatcaaaccaaattatctagtctcactgtgaataacgaaacattgtttgctccccattgtgaataatgaaactaagtgaattttagttttacccaaaatattttaatctgtacctgcacccgagtgacagatggcatatatccattttacgcagtgtttaacgcagtggaaaataatattctgggagtaagcagaccacttacagacctaccctgggtctgccactagtgtgttgtacattagggaagtcacatccttcctgatgactcagtttctttgcacaatgaaaaagtctgactcaagctctgatctcccttctttgatgaaattatggggttcttgctcagaataaactggaattagaaattattacctcctcctatgaataaaaataatggtgattttaaattgctgtttattgattagagaaaacatcacgtttttgtaaagctgacttagaaaatttattttctgattctattggtgttatttctcttgaatctgcccaaggagaaagttaaccctttgtgccccacaatgagcacatcttccctggggactctgtgtgctgatctgtccgcttgaggggacagaagggagagttggtggcaccaaggcatgtggtggacagcaaagatgccacccatcaagacctgatgagaagcagcttttggtttttaattaaaaacataacttttacaatgcctcattcatttcttgtttttatagaatcaaaacatagacatttttcttaaatgaaaaccagaaaccatttaaacatttttaaagcaagcaagttaaaaaaagcagcttaggattgtcttttgtaattctgccagtttcaattttgattccttaatgcaaccagtatcaggataacaatatttgcttgaaaagaaagagaagatagtcctcaggggctgtttcaaacacattttagttgttcgattggctgatgtgaggctagctactgttattgaagttgctttgatgaacagtgaaaaatacattcataatgtaacaatctcaacattttagatatccttagtaaactcatatttagcagatcctaaaaagtgtctgtgacaatagttctaatttttttttttttttttttttttgagatggtgtcttgctctgtcgcccaggctggagtgcaatggcacaatctcggctcactgcaacctccacctcccaggttcaagcgattctcctgcctcagcctcccaagtagctgggattataggcgcccgccaccacgcctggctaatttttgtatttttagtagagacaggatttcaccatgttggacaggctggtctcaaactcctaacctcaggtgatcggctttccaaagtgctggtattacaggcatgagccactgtgcccagcctaattctaattatttttgactacttgtgttagtgtcacagatttaaagggggacataggtcaaatttagataaaagattaagttaaatatggatgaatagtatttgttaaatatctattatttgttatgcagtttaattgaaacaactggctttttttttttttttttttttcagctacatcctaggaccttgtggaaagaacccaacatctcttggttacaaagattatgaaatattcagctttacccatgggtatttcctgacatttctttggtaaactgtagcctaatagaagatatcaggaattagtgtaagaaatattctaaaaagctattgtcactacaaagatgaaagtaactttgatgatcaaaaagaagtcaataaaaaaagactgaaagtagttcctgaatccttctctattgttcatttgggatttcttaatttccctactctcaatatattatggaattttctgtgtgaagttttgccatgaattaaattgatgtcaacaaaagttttaccttaagtcatattttaccacaaactagagaagccccagtcctccagggagcaccttttcctgcctttaagaagcttgtctcttcttcttcttttaattacaagcatcatctacagaggatggggctcagttgaccttcagtgacaattagacctgctgatttgacatgaacaaatccatgctcccatccgaggaggcattttcatctctttgacttggcacacgatgggcaagtgtgctgtgcttgtgtttcctttgctcgttgcttttctctgcccatggaaagtcaatggcatttgctcctctaccaggaagcaggaatacaatgtctgtttgcctgccatccttgataagtttactttctctatcattgctatccagttttttttttatttgctagatatgtaacttgaaaattgtcatggaaggagcaaaagtttggagttcagataaacctggatctgaatactcttctactactgtgtgatcttggatctactgctgtgtgatcttggatgagttaatcactctggattttggcatgctattcacaaaatgcagatgataatactgatcttacatggttattgtgaaaattaaatgaaccagtatgtgtaacatttattgtacagtgtctgtcatcttgtcagcatttgataaggtatagttattattaattttttttttttttttttttttttgagatggagtcttgctctgtctcctaggctggagcgcagtggcgtgatctcggctcactgcaacctccgcctccccagttcaagcaattctcctgcctcagcctcctgagtagctaggactataggcacctgccaccacgcccagctaatttttgtatttttaggagagacagggtttcaccatgttggccaggctggtctcgaactcctgacctcgttgatccgcccaccttggcctccctaagtgttgggattacaggtgtgagccactgcgcccggcctagttattattaattttttattctagtattattctattttgttatcctattgttgggtgtattacatagacattatataaaacgtatatgtatatatgtatatttatgcatctcatatacatgatatgtacatacatatgtgatatacatatgacacagagttcattagagagtaggaaggaattataggaaggcaagtcaattcagtaagtattaacagtcagcatctattaggtgcttactttcatcattttgtacaatcctctatcgtgggatcctgtttgtaaacatctccagagattaaagaagaaaagaaaaccttccctatcagccttacttttgtgttttcccttcccccaaattcagaataagctaatataatatgccaatattcctgtactgagttttacaaccaatgtataaacatctgtcaattcctatgactgtttctgtacataatggattggtggcacttagatcaatattagcaacgctacactcaacagctgagggcaatgcatttataaagggtttcatcaagattcatggtctctagtgatacatgttgactttttagtttaaattgtcaaaattaccactaagtgtaatttattataaccagaagagttgggtgaaaataatgctgtcatttaaaaataaaataggtcattagctattgtcacagccatactattctgggttatattacattattttgaaaagaatggaaagaaaaaggagaaaactaaaattcaaaagaaaatgtgatttatgcctctaagcaaaataatatccatttattttgaaatgatgacatagcagacactgttggctgcatactcaacactccatttcccctcctttttgttccagttttcattcttctcccagtttcatcaccagcaggtgggtcctgattattctaggctagttttgtatactcagttctttagccagggactgggtatgccaggctaagcatgtgaccttctctggccaatgacatgtaaagggagggggtagtttccaggaaagatttccttactcattaggccctagaaactggcagcccttttctgcctccgaatagtgcagatctgggcagaatgcctggcactgctgcagccatcttgaagttggttctagaatgaagccagcaccggagggagagtcatgagaatgctttacttgtggacttcttgttctgtgaggtaataaattgctttattttttatgtgaaccatgggtgggatattctgttacttgcacccaaagcatcttaactgaaacaggcaatgtgtaaacttgtttttttttttgagacggagttttgttcttgtcacccaggctggagtgcaatggtgcgatctcggctcactgcaacctctgcctcccgggttcaagtaattcccctgcctcagcctcccaagtaactgggattacaggcacctgccaccacacccagttaatttttgtatttttagtagagacagggtttcaccatgttggccaggctagtctcgaactcctaacttcaggtgatccacccacctcggcctcccaaagtgctgagattacaggtgtgagccactgcacctggctgcacacacttcttgacctagagaaagtaaacaagagagtcaaatagtaaaggagagggtacctgttcctgtgactccaattctttgtgttgtaattttttctctgcacatcgcacctgattagaacggttttctaattcatcttgtaaaacctgaaacggtataaaataaagatatcattaataattagcacacttggaaaaatagttctacaccatgaactggcactaaaaaggcctcagatctctagtttattactcttgttccaaagcattcaggcaaacaataccagacttttgtgtgtcaggccaagatgttttctgctttaagaatacctagtataaaaaattccaaagttataaaatagacaaattggcagatgtcaatcatatattaaaatgtctcatattcccagcacagaaccacaagcatgtaataaagcatatgtaataaagcataacactattgcaatgaaaatggctccctcaggacacctgcaatgtacacttacactctgaatatcattgtgacggataggaattgtaatatctgaccagcataacatttttcaaaattatattatgataatttgagtaaattatagcagccttaaaggaatttctttataaagtcagagaggatggtatggaacttgaggaacttgtaagaaatggaaagaggtgaactctttcctttgccaagtagctgtttgaaatagcattcaggttaatatgggaaatggaaaccacaaagaccaataattaccactgcatcaattactatgttaagtaaagagatgaactagaaaaagaacttgtagtttccatgtgctatttctataatgacactggattgtccattcaaacaatccaatgtaattacagaaatactacatggaaagttacagtgagcagaatgcatggggtggtaacagcaaaggtgccaaattcacaaaattcatttcatccagtcaatattagtgagttcctgctgtgtgtcaagaattacgataggtactctagacatagcaatgaaagaaaacagaccaaaaaaaaaaaaaaaaaaaaaaaaactccggtcgggcacagtggttcacatctgtgatctcagcactttcaaaggctaaggcaggaggatcacttgaaactaggaattcaagatcagcctgggcaacatagcaagatcttttctacaattttttaaaatttaattagctgggtgtgggggtgcaaacctgtggtcccagctacttaggatgctgaggcaggaggatcacttgagcccaggagtttgaagctgcagtgggctatgattgtgtcactgcactccagtctgggtgacagaatgagaccctgtctcaaaaaaaaaaaaaaaaaaaaaaatccttgcattcacatgcttagattataatggggtggaggtaggcaataagcaaacagtaagtgtattatataaccgtgatgagtgcagaagaaaaataaagcagggaaggggacattctggagtggtgtgaggaagaggggattgagattttaaatagatggtccaagaaggcccagctgggcgaagacctgaaggacaagagagagcaagtcacatgtaaatttccacaggaagagccttccaagcaatagccactgcatgtggaatgactccgagatggtatgtttgtggaagccataaggtcactgttgagagtgatcaaagcagcagcagtgaagtcaaggacataacagggttcaagtcacatcaggttacgtggagtcttgcaggtcaaaggctttagattttgcccagagatagacaggaagttgctggggggtggggagcaggtgctgctttcattgttgtctgaagagcagactgaggggcaaggcagaggcagagagcaggggagaggccactgtaacaccaggaaagggaagatggagagcggggccaggtggtagcagctgatgaaggaaggatcaggtccaggtatgaaatagagatgatggccctgaaggagtggaagcagagagaggaaaaaacaggaccccagggattctggcctgaggagctaagactgcagttggcattcacagagacagggcaggtgttgggggagaggagccggagctcagcctcagttggcttcagtttgaaatgcctattacacatccaggtggagacacgagttcagacacaatggctaaattagtgtccattaaagattcctgcaaacacaatgccagtcttttttatgtccagataaacagtggttcttaaccttttgggaggttctagactcctttgagaatctgatgaaagctatgtagttactccctagaaagagaaaaaccatagttttatgattttgcctctcactgtaggacattcatagattgcctgaagcccatctgtgaatggaccccaggctaagaactaatttaaaaagtgaaatggtctgtgaatgagcttgcatgctttagggtgtctttgatattagacttgatcataaatctacaactcaaccaggtctgagaatgagcttggaaatctctccattcttgaattgtctataattctgttgttgtgttctacttccaaaaggatgaatgcaatagttcctgtgcttgttgatgaggtagcctttcccccaccccctactttcatagctaccaacaaataggatcttatcagcttcttttattgcataattggggaaagtaatgattactgtattgggaagaatagttatctattttttttgtcaccactttttcctgctctctaatccatcctcacaccactgtcagagtgaacttcttaaacttaaatctgattatgttgttccctgactgaaatgcttaaacaacactccagccccgctgagagacagctctcactccttagcacagcatacaaggggcttcatcaactggcttggtctccagccacgctgtgccgtaggaagccttggcatgccgtgcagatgtcattatcagcaataacaacaggagctatcatccacggagtggattttatttttaacccttacgacaattttgtgcacccagtattattccatctatgttagagaggatgtaattgaggctccatgcagttaactaccttgctcaagtccatgtggttagcagtaagacactgcactggaattttttttttttttttttttttgagacggagttttgctctgtcacccaggctggagtgcagtggcacaatctcgactcattgcgacctccacctcccgggttcaagcgattctcctgcctcagcctccaagtagctgggattaaaggcatgtgccaccacacccggctaattttttatatttttagtagagacgaggtttcaccatgttagccaggatggtctcgatctcctgtccttgtgatccacccatctcagcctcccaaagtgctgggatcacaggcgtgagtcaccacgcctggcctggactggaattttaacatatttttgtaacttcaaattgaatatgtttgtgctactccatgctgcctctttcccactctgtactgattttctcttttctttgcctggaagtccctaccgcacctactctgctcaatgatgtaattgccctaatctatacaagagctaagtatggacttctctgggctttcatccatctagtgtttaagagaattaatttacatgtctgggtggcatgcaactgcagctcagggctctcctctcttcatctctgcaagcccagtgccaagccagctcaatgcctggtacacaggtgacactgaattcatgtttgtggaaggaactcataaacatttgaactctactccctaaagatatttacttcaatcatcagggcttctgactgtccttcatgtggcacatttaaccaaaggtgattatgtgtcctgagacacaaaatacacaaatatatcctccaaatgtctatatctatctctgaacacacacacacatatcataatgataataattgataatatattatctggtttctgctacaataaaaaatactcctttaattttatttcacagaagagaaagatggcatgcctctcccttctcttaaacgaagagttgttccccacttcctggcttctctccctccttgccttcacctgcagaaccctgagagtgctacactcggcgtcccacaccctgccccattcactacataccccgttacacctgccccctgtccccactgctctcctgagtcagttttcacaccagtcacttgtcatctaccaaatgccaaaaccagaagctaactttcttcctttttccacagaagcatttggccctattcacgcccaattgtgtttttctcttgaatcttgaggaaataattctgctcagtgaagtcaagggattaaaaaaaaaaaagaggatgctgcaaaagtgaaggccaaagacaacaggcctggaaagagggtgatggatatggagaaggggatgggtgaagtggaaccgttgacagggaattggaaaaaagggactcagagataccccaaggctttaagatggagtgaccagaaaatagtgaattcttgctaagcacaagtcagaagcggtggggcagtgtgctttctgacatgctgggttgaaggtgctggcgggacttcaaggaggaactattgctagactccaaatattgctagacactatccgtgccccctccaaattcgtatgttgaaatcttaacccccaaggttattaggagacaggacctctggcagggaatgtcctcaagaatgggactggtgcccttctaaaagctctgagtgaggtccctggccccttccaccatgggaggacacagtacaaagatgggtgtcaacgaactaggaatcaggcaggctctccccagaccctgaatctgctggtgctttgatcttggatgtcccagcctccagagctatgggaaataagcttttgtgtttaggagccaacctgtccaagggatattgttacagcaaccagagctcactaggacccctggctagcagatcacgttgctcagtgggtctgaacagtggggcatgctctcagacagaggtgcaaatgcggaaacttccttagggaagtttcctaaaatgagaagaggttctaaaacctgccctttgggtgatgcccacactcagacaggcagaggaggagatggaggccaagaaatctggtggaagtccagataggcaggaggcaattgaggagaagttaggatgacatattacggaaatctagccaaaagaaagttccaaagaaggcagggtaacataactagatctgatcctttttccatacttcacatagtgaacagactacgaagtcaaccatattttatcagtattattaaaatggaattcaaattacatttgcttttcaaaaaggcaggcctttaaaaatttccttataaagatgtaaagtgtgatctttctaaagttaatcagagaaagcagttgtatttagaaatgactttcgttacctattaaagatcagttaaaaaactgaaaagtcaccaaataatatttcactttcaaaaaagttaaaatgtacggcatgaaaggaaaatgacagtttatattggcagctggtcctggttttatattctaaaagattattaggttattagagttccaacctcagaatttgacataaggactatgtgaaaatgaccacaattgctcaataagtacaaccgcggactttaagttgtgtcatccttattcaaaaaagcttcaaatttgacatttcacacacacacaaaatcacaacttttagtttcttcctgagaaaagcccaagataattaaagaacagaatgtccaacactgggtcaaaaatatgaaacaaaacccaacttgaacagttaaattgtttattctgcagaactgtccctcctctcctagctctgcagtgttaactggcatcattactgaaaagacagttcttttctcccaattaaatctgcctttaaatatactgtaagtcagctggctgtgggaagctacaccgctcctgactttcagagtgctttctgctggtcgggaataaagaatgacactttccagaagaaaaatgtaaacgacataagcagctccacaagaacaatgagcgcacaccgcactctttaaaagggagagcattgtaggataatttgatttgttccaaatctgaaaataatgagagcaaattaaagtgtcaaaaattgaacatgttaatgggctcttcagggtgaggaaaaggacctggtagctaacatgcccattgaatggcacttgtgacagtacagggcttttctgtgagtttggggaaaaaagagtatctagtcaatgctattttaataatatgtatgaacataattcagctcaagccactccttaacttgtaaaaccacacattaaggaattatgtatagtcttaccaaagttttctcttgtagttctgcgtcaattaaacaagaataaagtgatggcagatacatgccttttaataatgaataaatgaaacacaagttcatttcaattataaagtggttaaaaggttttttaataaaggaaaactttattggaagagagaaatactaggtcacaatgataaaaacaattttttaaaaaatgttcccagaatacaaggtatataacagagagaggctttcagatgtagtactgtagcaagaccggacgtctttctagagatttctgctctcgcctttggcccacttcttagccagctccattccagcaacccaagagctgctaccttagtacccttttcccaacaggctgtctaagcgtataaattggtcttcagcttatagctcagaatattggtactctaagttcgtactagagaatacaatttcaaactctactttcccgtctttatcaaaactccatttatgagacatctggaaaaatccacttgcaaatcaagacagaatcatcagcagtataaaagtcacccttctgagtcagtggtcctggaaacactgtcctagcagagtggactgcagagacacattctcttacacattttctgtcatgcagcttgtagagtcgcattcttgcccccttttagagagtttcaaagcagttctcattgagttgaaatttaatgtgtttgacacatattctgcctcattctatgttgttacgtcttggtaaaatgctaatagtgcctggccttttcacaaatcatcatgaggtctctgagcacgtttttctgggcctgccctgcatgatggggcagagtgtaaatggatcttgtccttggttctgtccgtaggttcacccacatgtcctttgggaagtgggaaccttgaatgctatagtgttctgttatttaaaataaactggattgaatcatatgtaagcaaaaagagtgttgattaaagttttgccctatataaatacaaaactggggtcggtagagttgtggattttaagggccttgggtacagtctgtggccgtgaaacaaggaaccagatgaacctccgctgggtgaaacgcagaaaggggacttgcgagctgcaagctctgcaaaactgagttttaacaataagaaaaagccagagtatttatactgaagatgctgccaagaagaagtcaccctggcaaactgcgggcaactgcttgaagcggggtgatgggtagatggcggatctgtgtactcttctccctacttttgtgtatgtttaaaagcttccgtaataaaaagtcaaaacattgaaaaaagaaaaaaagtcccacttaaaaaaaaatgaggtcatcatatcctttccttcacgaggcttgaatttactatcctactttggagaaaacagatgattcatttgccactcagtggggaggagggatgcgggaggatttaccccatgaatgttttgaacacagaatgaagagaccaggggggtaggatgtgcatattttgactaaaggagaagataactagaagaggaaggcctatttttatttttattgaggtataatttacatacaatccaattcaatgtttattttttcatggtaatggtctgttttccatttaaaacatgtaagatgatttttaaatgtgtgtcatcaaatatttgttaagttataaaatcttgacgtaaacctctcttcccctggctgcttggtccttcagacagacgtgatgcctgagctgtgactacagtgaagagacactaattataaaggtgaaataagggtgactctcatttaaaccttaattgccttcttaataatgcccacatttgtttaagcagcattactccaattcagtctattaactgggctgataatatttctgatgagtaggtctccttttgccatgtaaattgacaccgaaacagtaaatgtttttctttctactactgctaaatgaaggctaaggtaaaatacaaataaagcagtaaaatctcactctattttcatgtgagatttacagacttattttttttttaatcatattgtaaacgactaggacaaagcaagaggatcaagccctgtcatccacacaaggagcgataaatgtggggctaccgaaagtgacacagtggcagcgtgacatttttactgggtggtctcacgggctatttacagaggccactatagtttctgttttattatcatttttaaataggctaaatctactaacaaaagtaactagtcttcttcaactgaaatgccactcaagatttcttttaaagcgatttcttcattcagacctacccaggatgaataacaaaccataaaaaaagttttattagtgattctacagtcatggaaaacaggttatgctgcagatctaaagccagagccgcagctactactgcagaggccactaatgcattcacaacgcaactgtataattattttcccctatggcttatgttcaggttttcagttttttttcacatccaagcaacacttattttttgttcaggttttcagttttttttcacattcccagcaacacttatttttttttcttaaaaaaacaaaacaaaacaaaaaaccctgataattctgtctcttttgtgatactgatgtgaaggtttttacccaatacatatgttactcttcacataaggcaaaattccttccacgtgaaaactttttagttgttgctgcgacaaaccacatgcatgagaaactgcactttcatatgagctattgctatagtacttattaggctactgattcaacatcaaaggcaaaaatactgtggccactatataaagcaagagtttttcttgtttgttattctccaagtacgaaagttttcactttttctctttccttctctcgctcacctattttcagtcctttaaaattcctaaaggacttcctttaaaggtcttaaaaatgcactttttaaaaagttaatgtttcctggtcttaacagaggttccaggaaaagaaatcatgttatttcaagactttgatgatctaaggaagccggaatctcctaacgcacctcattcatgttttcctagtcacacaaaagaccatcctgacattacccgcagctcctcttaaaggggccagtctatttctactcaggaaattcaaagcacattcccccgcttcgtggctctaaacagcttcacttgtgaacaagttcttatctcgggtggtagaaatctaggatcaaattcaagaaccacagctaggattttgcaagatcatagaggaatttcctcgtctggccaggatgataagcactcaaacttgagttcagtctctgtggaacagagtgttaactgttaaatcctcacagaccacccctcttcagtgcaagcccagggaagagggaggacccataagccattcatttaaatttcgattttcttacaaagactaattcacacatgccgtcccctgaacctgcagtatcatttccaatcccctccaccaaactgtgtatttctcctccgtgaaaactgaagattcatttcttccatgaaatatttcaaatacagattaaactatttcgcattgttattatattccctatatgataacatatttatagatctcttcctattgtgaatttatctaacttcttttctcattttaggctctgaacttcaccagagcagcggcctttgcccctccattatttgttaagtggtctctgaaatgcttggcaaagtgttatttacactacggtaatgagcatttactggtaacattaaccaactctataaagagcaagttgcctttcatttaaaacagttggggtactcccattaaaattctcagatttttttttcccccttaagctatatttcctctcattctgtccctagagaaaaataactgagttttacccagtctgctccctcgagtgtcagaagtggcctcccttcttgttttttaataataacacatctatcagtgcccttttttcacgatctagagggctggtcaccactgttgctctctcccttttgctaagtcccttctcagtgtctacactggcacgttgtctttacccgtttgcccttcaagaaattggccacatttcttttgtttgtttgtttgaagagatgggggtctcactatgttgcccaggccggagtgcagtgactcacaggcatgatcatagcaccctatagcctggaactcctgggctcaagtcatcttcctacatcagcctcccaagaagctggaactacagaggcgcaccactgcacctggctgtttttgttggccacatttctcaagtgtttgactccagtacccttatttctcccccattagtgaactccttcctcatcagtgatctgattttggtttctaaccagttatgagacttgttctctgcaaggtcagcgatgattctcttactgatgatccagtggccttttccacaactctattctcctggacctctctgttgcaccgggcactattagaacactctacttccagaaatccttccctttgacaccaccatgtcatgctgtcctcctcctccttcccacatgctttctgctcctcctcctcttcctcctcctcctcctcctcctcttctctctcacttgcggatatttccctaactaggttcttacctctctagccttctttctatacactgtgtccttcagatcattacttccgtaagttaatggaagtatttctataatctgggcatatcgcatgtaccagacgtggtactaaacattaccctcaaaaagcatctaatctaatgtgtacggcaagcttataaaggaactattacaataccacatgagcactgctaaaaagaagtcttaccaagcattgtgactgaacacaggaggaaagcaacaaacgccagggaaagtttagacagtgagaacttcctcaaggaggtaatgtgggagctggagggtttcccaggaggagaggagagtggtcctggggagtgaatcacagagggaaaggcatggtggcatagacctgcaatgcttgttggctacaccgaaggcatggccaagcagaggggtggcactgaagcaggagaggctacatgggttgcggctcaaacttatcaagtccaagactaaactcaagggtcttgtgtgccaggaggactatagattttaccctgtaggaatgggaaccacaaaagggcctaagatgatcagatttccaatacaggatgaacattcaggtgacagtgtggaaaatggtggcagggaggcctgctggggacagttaacagagtcttggcaagacatgggtgaatctatgggacaagacagaggcaaggatcagattccactcagccctctcagcatataggagaaaaccaggcccagaaaaatacacctgtaagcttcacgatcatttgtaaaaagtccaggaatacagaatgaggcttaggacattaaattttcggtcaatgagaaatgctttagaaactctaaaaatgaaaagaataaaaaagcacaattttacagactgtgtaaccaaacatgcaagaaaatctgtctcaggagttcactctgccatggctgggaggccattaggaggccatgtagtatcacgtgggagatgagcttgatttggacaagagatggcgagaaatgatgggcccgggggaatgcatgtgccgggatggcagcagagccacaagacaggttgcagggcttggtcatgcaacgaatgtgccaggtgcaagaaggaagtttaaagaatgactctgaggctttcagaataggtggctagggtgctgtcattaactaagacagagaacacagtagaattaaaatatacagaaaggaaggggaagaataagtttctgcatgacacggattcaacaggaatgatgatgccaatggcttgaccattagagtatggtgtcaaaaaagaaatcatggaaggaacagttttggggaagtaagatcatgagttccattttaaagtcactgagtttgaatgcatatcacgacatccagctctcctgcctgatatgggcaacagaaacactagctctaactagggcttgcctagtgacgactcctatactcatctccatacccaggatcgcacaaatcctctaatctgacatctccaactgtctctcttatgtgtgtatatggtggccttaccatcatctcaaacttccaagtccaagactaaactcataattttccccctcaaccagcttcccttccacctgtcctgctgatcaatgacaaagtcattcattcaattaccaagttcctggttttaaatctcacaatcatttgtaagccctactctctctgttctccctcctagttagttgcccacattccttcaacttctttttttttttgttttttttttttttttttgagacggagtcttgctctgttgcccaggctgtcactgcaacctctgcctcctggcttcaagcaattctcctgcctcagcctcctgagtagctgggattgtaggcacccgccatcacacctggctagtttttatatttttagtagagatggagttttgccatgttggccaggctggtgttgaactcctgacctcaggtgatctgcccgcctcggcctcccaaaatgctgggattacaggcatgagccactgcgcctggcctaacttctatttgaaatgactccactctacgtcctgatttctgcccaccaggattccagactctttcccagttgtgtcctcctgcatcctggcatgtaggatgtgttaagattagcatcctgcaccctgcatccttatcctgtcaaggttaaaatttcttccctggctctgaatcccttcctaaactagcttcatgtatctatctggacttctttcttactgtgctcaatatacaggaatccccatttatctgtggttttattttccacagtttcagttacccatggtcaactgtggtccaaaaagaggtgagtacaaatacagacaagaatatatattgtgagagaggaaagaaagagagagaaagaccacataatttttatcacagtatattgttgtaattgttctattttattattgttggtagtctcttatagtgcctaatttatatattaaacttcataataaatgtattagtccattctcatgctgctaataaagacatacccgagactgggtaatttataaaggaaagaggtttaatggactcacagttccacatggctggggaggcctcataatcatggcggaaggtgaatgaggagcaaaggcacgtcttacatggaggcaggcaaagagacagaatgtgtaagggaactgccctttataaaaccatcagatcttgtgagacttattcactgtcacaagaacagaatgggaaaaactcgcccccatgattcagttaacccccttccagtccctcccatgacacgtggggattattacaattcaaggtgagatctgggtggggacacagagccaaatcatatcaataagtatgtatatacaggaaaaacatatgatacatcaggttcattgctatctgtagtttcaagcaaccactgggatcttggaatggaacccctgtgcataagaggggattggtgtcctaactcaaagctgtcatgctaggtccaatatgcaggcactgtgctgtggctgtaacagctttactgactttcacaatgtccctctgaggtagaaacctcaccttataagaaagagtgaagggccagccacagtggctcacactttgggaggctgaggcgggtggatcatgaggtcaagagttcaagaccagcttggccaacgtggtgaaaccctgtctctactaaaactacaaaaattagccaggcatggttgcaggtgcctataatcccagctacttgggaggctgagacaggagaattgcttgaacctgggaggtgaaggttgcagtgagtcgagattgtgccactgcactccagaatgggcaacagagtgagactccatctcaaaaaaaagaaggaaaaaaaaaaaaaaaagctaaggttcctagaggctactcaaggctacccagctgcgaagtcttgcagacaggaaatggcccaggtccctctgcctctcagcctctacgttttgccaccaatgggcccagctccacacattgccctgtgagctctgtgggtcttatcttcatcatatctagaatgccattctcctgctattacttccatccttcaaaagccttctttgtccccaaatgctctggatttactattaagatatttagtctttaatctaacaaattaaaatgtacaaaaaaaaaaacccagaaaaacaagtttttgtgtcacagattcaacagtcataatgattccgaaggcttccctattagaatgtggagccaaaacgacagggtattacacaaagtgatgagttgaattatatcctccagagagacatgttgaagtcctaatccccagtacctcagaacgtggccttatttggaaataggatccttgcagacataatcagacgaggtcaccctggagtagagtgggctcttaatccagtatgacggacgtcctcacaacaagagacgcacaggaagaggttggccctgcgacgacagggccacagatgggagtgatcatctagaagccatggacaccaaggattgctgggaaacatcagaagctgaaagagacaaggaaggattcctccctagagccttctgagggagcacagccctgcccacaccttgacttcggacttgtggcctctagaactgtgagataatagcttctcgttgtttcaacccacccagtttttggttctttgttacagcagcactaggaaacaaatacacatgggaagaaacgtcccttgttttccacattttctcttgtaaaacgtgtaaaatacacacacacacacacacacacacacacacacacaaacatttctttcaactacccagtcctactagacctcattttacccatgtgagggccaacagtccaatcattatgagacaatccggaaaatggcattagggtattactatgttatattgatctatcggtattttcttaattttgtgtgtgtacatggtcgtatcagatcattaaggaagccactccaatagaatagatggctccttcttagctgatgaaagagatactgcttgaggtgcagaggtggagatcctcaggtgagcctgcctctcacacctcacattcacatgacggatagaaatcattcacgccagataaaatgtttttctttttttaaccttaggattctgtgatatctggagccaatactcatgaaggaagaagtttaaaactttccgtttaaaccacttagaatgagaggatttacaaagatcctgtttaatgttcagctgacacattgtcaaaaacgtttatcatgcaaccttttgaagtttcttccactccctcctagttattaaagcttggattgcagttagttatcaacaacaaagcatacacgtgatggtgtttttagagtcagcctttcagtttgatttctgaactactaagcaaaattcagttctcctgatcagaaaaatgattagtgacctacttttcatgctgaatgcacaaaaccgttgatttctgaaatcacttctatatggacctagggataatgcaagggacatggaaatttcatttgtatcataatgctccaaactgcaagaattttcagatataagaatctgccacttcaagtgaggctgtgattctttcagtgcaaatgaggaaatagtgacctacattattgagaagattcctctggcaacttaattcctaatgtaaatttcttcagattgagaataagcttcagttcgtgttttggcaaggggaataaaactctttctgaataattcaagcgaatactattttttgagtctgtacaatgtattagaaggtacagagttgggtaagacatagtctcaccttttacggcacttacattatcatagaaagtatgtgataaggacaaaaagcaggagagcatggtaagtgtgttaagtgttcaattgagagaacaaaaagaaaaaggaaggacagaggaagatgttcaatgacaccacaaggaagcaggcagataaatccagaatgtgggacattctacaggacaactgacttggtttctgcaagaagtcaatgacatgggaaaaaagtgaggaagggtctgctttagatttgaaaagacatgagagctgtaacaatcaaatgtaatgtttggatcctgattcagacaaatcaactgtaaaatggcattttaaagttaatttgggatacttagttatgaagtaaatattagatgatactaaaagataattgttcactgtcttaggtatgacaatggcactgtgtctgtgtaagacaatgcccatggtttctgagaggcattctgaaatacacagtgtaaaacgacttgatgtctggaatttgctttaaaatattttagcaaagaatgagggggaaatgacagagtaaatgtgaccaaatcttgatagttactgaaggtgggtgacaagcacacaggagttcatagtactattatctctacttttgggtatgtttgaaaattttcataataaaactaaaaaagaaacaaacattttatgtacagtaaaatgatataagaaaaacacaaagagactgggaacgtcttcaggaaggacgcagtatttgggaaaagccttgaataatagctacagttctgacaggcctaaggtggaaaggggaaagaattgtctgccaaagaagttgcatttgcaaaagtaaatacaaggaaaatgggggtgtgctcaggacaccctggtgcagtccctggagcaggacctggaatatgtgaaggggaggcagacctgaaaagaggaggccagagcacagtgaacttcagagcacaggctttagttacacttaacttggtgaaaaggagaggggcttttgtgcaatgcctaaaatcaagaaagatacacacagttacttcctagacatttacaacatgcgtcccaggcttaacaggttcaaaactggacgtattatcagttttcccactttatttccctctccttccactcacccctttgcctcaatctaattatgttcctatatattcagatctagattaacggaacccatattcacctagttatccaaatcaggaactgcgaggacacccttgaattttctctgccatctaaccatttaccggccttccaaatatttctcctcttcagccctatggctattgcccttgtctcttttcctctggatgatgactacactcatagatctcttcgttccaattcattattgccagagcaatattccgcatcatcttcaagtttctctatctcactgcacagtaccactaccacccacatgatctatcacattatccaaggcaaaaactcaggagatctctttgacaacttgcttctattccacatgttccctcccaaagactcctgtttatttgccactaacccctgtggattcaatctcttttaatttggtccacttcatgccatttttactgacattctctgattatattgtcccttttctggtctccatccattcctccgggctcccctcggtctcatcttcatacagcagccacttactttggaagtcattatgtaggagttatcattgaatccctttgttccctcactttaccctgccacattcaattttcactaggagtggcgcaggatgaatagaaaattataagtctttgacaaagaaaaaccttaaaaacatgcataacctacccacttctctccatctctagtactacctccttggtccaagtcatggccatcttttacctaaagatgactccaatagcatagcagtctccatctccctcccatacattctacacgtcaggtctgtccattcatctctcttacctgctcaaagttctccaatgacttacaattacacttagaataatatctaagctcctcaccatgcttagaaggtcctacaaggtgtggcttccacatgcctctcaggcttctccttgtaccagtctccactttggtccagccacacttgccttcctactattctctgaaccttacaaattcattaccattagcacttcccttctttcatctttaatctttctgattaaagtttcttgtcaggaacgtataagcattttcttgtcacactagcagtatataaggaatagaaaaatgtgtgttttacaaagaaaaactcttaatattgttttaacacctttcaaagtaactttaattaaagagacaatgtgcaaggtgaatcagaacttcatgtactgtgaaagaactggtgtgattccaaacacccagcatacttaacagaggaatgcaaatagtcaaaaatatattattaagcacaaaccaagactggttcttggcagtgtagccaaaattttaacagtgtagttgaaaatgtgttcaaccttaacctttcatctaaggctttcctttgctaatgaatcatgcctgtaactaaaacgctaaggttagcatggcttctttgaaatgaaccaccacaaaccaaacatctaaagcttaagatatagtgtttcttttcaaaactgacaaccccccgcactttttttttttgtattacatgaccagtcttcttgaaataagtgtggtctaggaaatctgacttttaaaattaattctcaaaaattctatttccccattgatgtgctgttagtatggtttgtcagtccaatttctgaaatgctaagtccatttgatctcccactaagggatcaaaccctattttaggacctaatatcaattttaaaaatttatgttttacctcagattataaaataatacaggctaattgaagaaaaatggaaaagcattaagagggaaaaagatttccataattcctgcactcagatataaccactattagcacagtgccttctttccacgtctttttcctattcatatgaaactggcacgttggctctgtaggactccctgagtgtaatcgtagaagcttctctctctcatctcccactgttcctttaatcctgcttagtggagacagttcttctcttgccccttggtgaaaattcagaagggtgccttgatttttcaggtcactctagtcctacagtcactttaaactgcagacaaagttttaaaacatttagatcgttctcaaccgaaatttaaatggttcttaagagcaatttaacgtaaggcaagacatatctaaaggattccagaacaccgttatttgacctatcatcaaggtacttttacttcctgtttgtctttgacccagggacttgaaccccagtggggtggtcgtggtgcctgcctcacacaccaatgtccctaatgatgactaagattggactggatgtgtaggtgtctcctggcctcaccctcctacttgttatattctgttctcctctgggagtatccctcaacgtctgttttatcctatttccccggcttcagctctttgttgcaggtctctgtgcatttttcttggcctgctggatgaatactcctcttcactctcatctcccttctgcagataaaggtcaaaataacaataatctcccctttatagggaaataagctgcctgaactccaggttcttgcaagagagtaaaacatcaaatctgcggcctaattataataaaaagattactttaattaactaacattaataaagatttgcaatatatatgttacaacaattcttagatatttgtatcagtctggtttcacactgctgataaagacatacctgagactggataatttataaaggaaagaggtttaattgactcacagttccacatggctggggcagcctcacaatcacggcggaagagcaagggacatcttacatggaggcagaaaagagagagaatgagagccaagtgaaaggggtttccccttatgaaaccatcggatctcgtgagacttattcactaccatgagaaccgtatgggggaactgcccccatgattcaattatctcccactgggtccctcccacaacacgtgggaattataggagctacaattcaagatgagatttgggcagggacactgcaaaaccatatcaatattcaaattttaattcatggataaaaccatcatctggttccaggtggaagcatgtgctttaggtgtgtgccatcagtccacattgagcggcattatacaaaatagctctgagaaacttgatactgcttttcctttaagaatattcttaagaacatcagctacatcttacagtttttcttccactgatctttctttgctctgcaatgtcttctacattgctaccaatgatctttccaaaacaaacctgactgagatcctctgctgaaaaatcatcagtagttctgctctatctacagaataatttcagacccctaagcatggcatatatacttgctactcaacgcctgctctgagagccagcagcgttgtaggatcttgagccctaccccagactgacagcatcagagcctacatcttaacaaaattcccaggtgacctgcaggcacattcaggtgtgagaagcacttatacagtgcacccttcatgagggtcctacagctgaaattcctctctggtgtcagtgctaggaaaagctgtgcttctcctgagcacttgacttggtttctattaaggacacgggctactgaaattcgatttcttcttgtctttagctgctatgaagcccaggccaaacatggagctctccttatagcagctttattggacttcatggcaggcattttgtttatgaattctattcttgatttcatattattttcatatctttttttctgtgattttcttattaatttttatccttttgtaccatatgcatctctctaagtcacctgaaatacttttagggatttggtgaggtatgagcccatgatatttgtatgcgtgtaagacagcaaggaagtaataaagtcaacaaatatttcatttcctggcctttccttgccctaaatggtatgtttaacaccagtgctaacttctcccaatccaacatgtctgtgtgtgcagaagcctcatgtcagatactttcgtcacaaacctagaggtattttccatagaaacctcttatgtaagaggaactgaagatatgaaggcaagagagcattggtgttaaggctcgtggcaggctggatgtcacagtgggaggtctaggtttctctgtagcttaagaagtgcactggccatccaggtcccagcttactctgcgtccccgctcttttctaaataaggactttctgctgttggtcttttctgtcatgagctgggctccaaagtggcaaccttcattaaaaagtgaaaactgggcgcttctgtctaaaaactaattaattcctgtggagacataagacaaaacacaaacaggttcatgtaatgacagtcaactgcttgtcatggcattcctgggtgagacagcatggctcgttggtggcgacgagtgggtggcgaactggagcttcactttctctctagcagcgtggctggaggcaggacatgtgacctctttgaacccatgttttcatctatatcacagcaagacatttgagaggtcatctcccagcactaaattcaactgtcatacgatcaattgagtttctagtattagagaggtcattagtctagtggtgaaaccttcaaatgcatggtagagtaatgaagcattcaaggtttccagtctggctgcctgagttggaatctctgctccaactctttgctagtcatgtgactttgggcaagttatttacatttttctgggcctcagtttactcatttgtaaataaaggaataataacagtacctatctcatatggtggacatgaggattattacataaaaacacaatgttagcacatataagagctcaatagatgttagttgctattttatcacaactggggaataagaaatgggcaaccatatttacctatatgttatatatcacacttttgttaagtttttgtgattatttttcttatggaaactctatattagggccatctaactgtatactgctgaccaagctggcactctccagctttttagaaattcatcaagattttatcaaatgcctgagtcaaagcatttgtgaagtcaaaacatttttaacataaatttccattccctctatctccccctgctatagtcacaaaaatgaacaaatggcaataaagtacaagaagtgcaagagggttgggagctcattcacgatcttctggtagagcagacagattccactttctgtttcaggtaccacgtccgttaccaaacaaccacacgactgaacacataactcccccgacactttgcccattaccaaagtagcatgtactcactgcatgcattttggcaaagtacaagggtagaaacaaagcaaaaataaaacaccactatcactttccccacagccagaggcacctactgctcaggttaatttgcatcacagagtccatcgactgctgcgagtgctgcatgcccagcagcccttccctgcttggtcagagggcactgccaccctcacaccaacatctgagagtcagcatgttgaaagggagacttaccaccaccctctgttcatttaatggataggtacttgaatgcccactgtgctcaacaaaataatttttgagatgccataagtaaggaaaatcagagtatgaaattaatggtctggccgccatggggcaattatgatcatttcttctgtaattcatggctatgatatacagaagatgaatagcggaacaaaaaataaacacctccttatccacttcttttagatctctaaggagactgaaatattctgtatttatatgtcaggtggaacgctgcctggagaaatgacggctaacattgcttatatctcaggcagaaatagtttcaagtacttttgatttatggcatattaaaaatgcttgcagaaataacataaaacaggacagggctattcgcgtcactatcctcatcatgtagttaccgccctcttctatctgactggcaaagcccagacaaacatataatttctgctgtgctgtggggcttcaaaagggctttgagcaacaacaaaaaaaaccctctgcttttttcaccagcaaatgtaaatagtgaccaaaatagtactagaaagtaagttgggttagaactgtctgggtcctgctctaattttcacttttgatgaggagatgtgaacaaagactttgccctctgtgtaggtgggtgctgtgggcgatactcaaaagcaagaaccaagtaaggcagagagctgtgcttatcggcagtgcagaactataatgaggcttgcattcatgccaaaaatcaccttcgccaagcaaaattggctaatgttgggtcaggaaagagaaaactggacataaaaagtaagaatggcagacataaggcacaaaataattggaaaacacattcaaagtatagcacactgacaactgaaaccacagtataatcaccatacattggtcattctcactttccctgcatactgtttccattgctgtgctttacagaaaggtaggtagacagtacatggcaactcaggattctggcagctttatggaaatgcataatatgtgagtagggtgtgtctttctaccagctagtggtggtccggggggttaccaggtaggcagacaattagaacctgtggaaatcattaaaattattacgtagccttctgaaattgctgtttttattctggggaacagcaaatccaaatctgcacaggatacaaattatattaactttggaaacaaaaacataataaaatctaaatatagctaatgaaaacctatactgtctaaagaacaatttagaatttattttaagagctgtaccaaagtgttgtgctacacattggttcctagaaaacatactcttgtgaaggcaaaattcaaatatttcacaaataatagttcgtttcaatccctccatttctttaacagctattattccctctcacgtcaagtcaattgactttctttttttctttttttgagatggagtctcgctctgtcgcccaggatggagtgcagtggcacgatctcagctcactgcaagctctgcctgctgggttcacaccattctcctgcctcagcctcccaagtagctgggaatacaggcaccagccaccacgcctggctaattttttttgtatttttagtagagacggggtttcaccatgttagccaggatggtctcgatctcctgacctcgtgatccgcccgcctcggcctcccaaagtgctgggattacaggagtgagtcaccacgcccagccgtcgattgactttccttcttccataaattcatctccaaggagctgaagaacaccaaagccacctcttctctctcggtctggccagtcttcatctgtcaattggattttgttttcttttttaggccacactttgaaaggagcctttgaatgtcagttctctaagccttgaatatgccccttgcctaaattatgcaagtatcctctaccttcccctcttcaaaaaggtttgatgattcccaagagaatgtatccctttgagctccaagcatcatctctctcctgtcactctcttccatacataggtaaacacacacacatatacatatacacgtgtgtatatgtgtatatatctctcttcatgtacatatgtacataaatcttgcccacaatgtaaagatgtaacatatttagttaattctgcttgttacatctaatttattctgggctgtgataacccaactgatcaaaatgtgaaaaagtcaacactacatattttatggatcttattagttttggatccatatgaatatcaaagtttttttttaataattattagccatttaaatgaagatgaacatctttaatagtatatatatctgtcggtttactcttgtcaccttactgtcagttcagaatgtgagcccagacctagcatcgctttccccagctcctaaaaattacatgactttgccgtcttcattcattagccacctgcgtacctagccatactatcagttctttcattttctctcctagcttcacctccattttggaaacccattcaactactcacaacagtattgtattattatttggaattgatgcaagtctgaaaaattaagcaatcccatattctggtaaaaatagcattaccaaatatttatatacaagaaaatattggtatatttaggcagaaaaaaatagtctaccctagatgatgtttagggcacatgtaggtacaatggaggatgaggggtaggcaggctagtggagctgttaggcagtggggagcagttgaaagcttttgagtaggggagctgtatgaatagacctgaatgatgatacatgattgacttatttgcaacggtaatactacaagcagcaggtggagcagaaggagcaaggagacccaggaagagtccaggggagaagtagtaagtgtaaagtggattagggtaatggtaacagaaaggaaaagagtaatacagagccaggaaacaactcatgtgatgtaggaagagagaagggaaaaagtcagctgacactctcagtccaatttaagtcaggagtaataaggatggaggggaaatatgctgagttctagaggccaaaagatcatccacgcagaggtgtctattcagtctggaacctgaagagaagccagggtcaggtgctcagtcgggattgttctgcaagaggaattagagttgaaattgtaggagtgagtgagtttgctaagagagaaagaatagagagaaaaacaacataaaactttggggcagaatttatagttagagtccctgaagagaaaagaagaggcagcaaatgtattaataaccataaaagaaatttttttttttttagacggagtcttgctccgtcgctcaggctggagtgcagtggtgtgatctcggctcactgcaagctccacctcctgggttcatgccattctcctgcctcagtctcccgagtagctgggactacaggctcccgccaccacgcccggctaatttttcatattttttagtagagactgggtttcaccatgttagccaggatggtcttgatctcccgaccttgtgatccacccgcctcggcctcccaaagtactgagattacaggcgtaagccactgcgcctggccaagaaattttaagtgtagtgtagaatctggggagtcaagggagaagaggatttccaggaggtggttatcagagttgaatgccgatcaggggagttagggggatttgtgatgaacattatccttacaatcatcacccacataacaatgatcacaagaacagcaacgactactacagtactactgttactgttgctaatactaaaaatatgtaggaggaagttgattacttctaagcatgtagttttattggttgatagatgtaaataaacaaatcaatttcttcattcaacaaaaatgtactgagtacttataccaaaccgagcactggatataaagcaaagaataagaaacgaacgcatggtaaaagcagagaatataggcatagccctactctttttctttctttgttttttttttgttttttgagacagagcctcgctctgtcgcccaggctggagtacagtggcgcaatctcggctcattgcaacctccacctcccaggttcaagcaattcttttgcctcagcctctcgagtagctgggattacaggtgcccgccaccatgccaggctaatttttttttgtatatttagtagagatggggttttaccatgttggtcagtctggtctcgaacggctgacctcaagtgatccgcccaccttggcctcccaaagtgctaggattacaggcgtcagccactgtgcccagccagccctatgcttttaagagttcgatggttgaaagagactgagcggggaaggtagagcggggcaggggagggactacttggagtcaagtcaaagttttagggaaagacctgaatctgaaaaagattatttaacctttatgtgtctgaaatactatattgtgcgaattgtaccgtgagactcatccaccatttataataatgtttctgttggaaaatgtgttcaaagtttccatctgggatacaaggaacacatccttccttgcaatagtcttggtagcgtaatcaattcaaaatgtggggataataatgaaaatgagaaaaggaaccaggagactatgaggaaaaaaaacaactgaagtgcatgatgctgtagaggggcatttcagggacaaaggggttccaaggcccttgctaggaacaggctggggcaagaaagtgacaggaatggaaggctgggagtcatgctttcctgactacaggtctggattctagaaatcatttattattgccatcccctttaaatatgaaattgcatttagaaccttcagaagccaggagtctgtaaacaatggtgcaaacaattcaaacccgaagacattctcagctgcaataaaatttctatttacatgttccattttttaaaattcctagaaaaatgctacttttatgactgggctctcattgggaaatataatttgctcagctaaataaatctgtatatttcaggacatgtaaccacatcacacttacaagtctttgctatgaatttaaaaaggttccttgcccctggaaacagccttttaaaggctgttgtgggcctcacgcaagtggctagatgggcggtattcagcacacatgtcctgtctttaatctagaatgatctcacaaacacaaaaacaagtcagtcccagaagagagaagattccgcccctcacccacaaaaaatactagaaataggacaaaaataaggttttgaaacttatttgctggttttcagaactgccatattatgacgactatccttaatacttatcttttcttttggttggtttttcctccctagcttttgaatcctagctcttccttctggttccagggcttaaccaaaaggcagatatttgacacttgaacacgaagttcagtgtccagcacagtgggcctactttatggatgctatacagtaaatacaaagcactgctttgcaaaatgtttgtttttcttctcaaaccctgtatcccaaactctcacagcttttgagttttaattttcccactcatgatttcttggaaagccagcaggtagagaatgtgtgctcaagtgaaggcatgggtggctgaaggtgaaaatgtttaaaagggtccctgacttcttggccaggaagaaataagcaacacaaaagcagggaagccaactgaactgaaccgtccactgacagtcatttaaggtggtgggctcactcattaaaaaccaaatggaacaacaaaaaaaatcctgtacattttttttctgataacttttctctattaatataaaatttgacttgtctcttcaactatccatatataactaaacaaaagcacgggggcataaaagtgaaattttgctatattttaactggaagttgcatttactatttaaatttcaatcaaatatttactatttttggctgggcgcggtggctcacgcctgtaatcccagctttttgcgaggctgaggcagatggatcacctgaggtcaggagttcgagaccaggctggccaacatggtgaaaccccgtctctactaaaaatacaaaaaatctagctgggtgtggtggtgggcgcctgtaatcccaactactcaggaggctgaggcaggagaattgcttgaacctgggaggtggaggttgcagtgagccgaggttgcaccattgcactccagcctgggcaacaagagcgaaactccatctcaaaaaaaaaaaaaaaatttactattttttctgtagaatataatcaatgatggggtttttgcaaagtacctccttcaactcatcccattacaatactatgttttcatgagccccttaattttaatgtctatttcagtggaagttcaatgagtatctcctaaattctattgactttattttgggagggtttagtttagctttctttctttttgtgatctatttgtttatgcttattgataaaatcaaagggatttttatgtcatgaaataatatggccttaacatggatgaaagaaaaacttggataaacattacaagaagaaaggaaagggaaatccaacattgcagaccttctagatagtttagggactgacgattgagaagggacagaccagaaagtgttcttatcttggggttaagcctgtaagtgtgattgttctcttagccctaaaaattttgtcagatgtttccacgtgaaaccttcagagaaacactataaataatttgcatcagagagaggtagagagaaagggaaagaaaaggcaagtgggaaaacagatctgaggactcacccccaagcatggaaaatcgaggatgtggggatacttaagaagttaaatttcttgttttctctgcatatgtgttgtcacatcactgaagaaagaaagtgctttctgaaaggaactctttcttgttgcatgcctttcacacaacagtgggtttacttgacagtgaacactaggcacggggctctgctgtgaacagccctgttcttgccaggattaggggccagtgggaggtgcaacagcacccagtccgttgcatctggctctactacagcaggagaaccaaagggcacaagaggtgaataaagaatggaacattagtccgggcgcaggggctcatgcctgtaatcccagcactttgggaggaccaggcaggcagatcacttgaggtcaggagttccagacctgcctggccaacatgttgaaaccccatctctattaaaaattaaaaatacaaaaattagcccggcgtggtggtggccagctgtaatcccagctgctcgggaggctgaggcacgagaatcacttgaaccctggaggcagaggttgtagtgagctgagatcatgccaccgcactccagcctgggtgttagagtgagactcagtctcaaaaataaaataaagaacataaaccagtcctagaggctggaatggtccaggaaatctgtctagaaacagagacatccaagatgggacctgtaggaagagtaggagttggccagaagaagggagaagaaacagcatatgccaaaggctgaagatgagagaaagctcatcctaactgaagattttttaaaagatcagcactggtagagggtgtgagcagcaggaaaggaagaggagacagagaggactggggcaggcagggcagccttgcgagcgcatctgggctgcatcctcagggccgtggggacccagtgaagaaagatcactctggatgtggtgtggaggagaggttggaaggggacaagcctgggggcgggagcctgttcagaagcaggggagggctagtactttcctgaactaggggaagggccttgtgaatgcacagaagaggattagccaagctgaggctcagagggctgggtgatggactgctcatggcaatgaaagagaggaggaaaggaagggttggatcaaatgggtggacactgacatgaaccgcatttgggaacacaggaacggcagcagcaggtttaagggggttcagataattatttccattttggacatggagagtttcagttttcagtaggacatgtcatctgttttgatatccagggaggttttggaaagggctagaacacactatgatctaaaagatctgggctagagatagaaagttgccagttgtcagaacataggtggtagtgactgaggttgcctaagagagattgcagagcctagtaagaaaaggaagccaggaacagtttccctgtggagcaacagggtttcaaggcaagagacaaagaggggccgtgaaggtttctaggaaagagctgtcagagaggcagagggcatcccattgtgtcagatacttcaggggagtcaagctggtaaagacagaggcagcaaggatgtcactggcaaccggaagagcagtttctgtggattgatggcaacagaagctggactgtaaagtaataagaaatgagcagggatggagtacagacagaagctagaagggaaacgggattaagatagatttatttaatatgggttacacttgaacatatctcaacacttattgaatagggcctttttcagtaatttaacagttacataaatatatgtaggacctattaagtagcagacactattccaatgcttttcaaacattagttcactcgattcttgcaattcctatgagacaggctttattgtttctctcattttggaaatgaggaaactgctgcacagagaggttaaataacttgtttgagatcacatagtttctaaatggtgggtctgggatttgaacctaggcagcctggttccagaatccatgcttttaagttttatctctctctctctctcttttttttttttttttttttgagacggagtctcgctctgttgtccaggatggagtgcagtggcatgatctcggctcactgcaagcttcgcctcccgggttcatgccattctcctgcctcagcctccaagtagctaagactacaggtgctcgctaccatgcctggctaattttttgtatttttagtagagacggggtctcaccgtgttaaccaggatggtctcgatctcctgatcttgtgatctgcccgccttggcctcccaaagtgctgggattacaggcatgagccaccgcgcccaggctttaagttctatatctctctttaacgcaacacatggaagataatctaagaggatactttaagccttaagaaaaatgcaacagtggtagcatttaaaaagactgggctccaggtaatacttcatagtttggcaaaggttgaaaaattacttaaagtagcacagagcctgacatcttcataccactgtgctggtatccttccaaaaataaagaatgctgctgtattgatctcttttatttatatattgatcatctagcatcatagaaacaaatcatttgaactaaatggattctcaaaacaactggcttcctcttagaaaacaaattcctcaggcttcttgcaaataaatcttggcataagtgtctttgctgagcttccacatctatgaggctgcaagagatcgttattgatcaacagttccttcctttggaacgctctttaaattagttagtgtttaaaaagatgccttttcaaataataacctcttttctaaattggccttagacattttgtttgcaaggaccactagcataattaaaaaaaaaaatcacagcaagcaacaaagccaactattgaaggaaagaaacatttctcagactgcccacatgagaaatggctttgctgagccccactctaaaagccaagggaaatttctgcttgaattgcaaggaaccacagtagaggtgagaaagatgctccatccattttagcagctcacatatattttaaagtaaaagtagtgttttcattttcttgcgcatttgactatgtggagtaggaggggaagaccaggcttagaagttctggatttgagacttggtgttgctaagagctgcctaaaaagaaccaggcacttaccctcaggtgggcttaagattttcatttttgaagtgggggatgagggtagaaagactgggaggtcaatagagccaattttctttctttctttctgttttttgagatagagtctccctttgttgcccaggctggagtgcagtggtgtgatcttggctcactgcaatctctgcctcctgggttcaagggattctcctgcctcagcctcccaactagctgggattacaggcacacaccaccacacccagctaatttttgtatttttagcagagacggggtttcaccatgttggccaggttggtctcgaactcctgacctcaggtgatctgcctgccttggcctcccaaagtgctgggatgacaggcgtgacccaccatgcctggccagtagagccaattttttaaagattcttttcagcttcaagattctgttaatcaatgaaataacatggaattatgatttcagctggtataaaagaaaacagattcacatgaatccagtatagttaatactctgcttattaagctttgttaagaacagaagaagaacggatgagagagaacacgatgtttgagaacagagtgatggtgagcttaagtggaaaactgccatttagaagaaaagaagatcagaataaaaacctagctagaaaaaatggggcataggatctgaaagacaagtctgatatttgaagtgatcggagctcaggatcagtcttcgtgaaaaagcattaggtcaagaagtgaaatggtagatttgtgaacagcaaggctgaaacagaggccacaacatggaagaatatccattgtctagctgggagggatttgaggtcaagcgcacattctgagcttctccaaataagcctatctacacagtatctaaccaaacaccatacagtgtgttccgaagaatacatgtgcttcagatgtagaacacaatccatcttgtgatgttaatgacacacttgttttatattcaaacagggagcccaaactgcttctgtgttctgttccatggtaggtagacatgaacttacaatgagatgctatttattaaccatgccaaagaaaaaaaactggccaaactcggagactttgtaaacaagaatttgctgacgctatttttaaaaacaaaatgaaatcagataagccagcttggaaaatagagaggaaagtaaatatatctctccaaagaacatcaatatttgctaaaatatggaataattagttttttaggcagcaatgaaatactacctacaaaaatgattcactgtattaaaactggcagtccagttgaggtcttgtaagcgttgtacaggaagccaagtttattgggaggaacctgagaagagctcagttctccagatgagagaatacaggctaacatcacttgcgaatttggaatgaatctgctactagaaacggcaagaatataaaagatgggaaaaaagtaattgggaagaaaagaaaaataatgcttgtctctaagaatgctgctgctttgttttatgaactagtctatttgttttggctccaactaaactcaagaatgtttctgcatattttacagtgtagtttatagacatcaaaggaacaatctcccctttcatcattatttacacataaaaataatgcaatttgtggtacatgtaaaatgttacttcttaaaaagctctcgagtctaatttattaattgcttgagatttaaagttaaacaagggtgagatgcaaatcatctgttactctgaaatattttaccaccaaatcctgttttattaatgagatgttgagcagccatatgaatatttatttaggtggttagagggctttatgaagaatcctacagcaagtgacagagacataaaagctgaagggttctgcttctcttgaaaaaatgggggttgttcttttttttaattccactttttcctctgtgtttccaacattaaagcattcctgtaacccaccaaccatcccggccttcttgctccaaatcttttgcctttgctgctactactgctgctattatagcaatagcctcccattgacaactcgggaaataacagcctggtctttttgggtggcaggacagcatcacattaatttttgccaattacatacacttgaaaaacatgatatatgtgtactactaggtttattttgcttaatttattgattttggttcagttccttagaaactgcataatttaccatgcgatattatagatttcctgatgcagtagcaacaagtcccttaaaaataactatataaatgtaaaatagaatgcgctagaaatgtctttaaattgttccatgatttataaggcacagttatgcagaatcagttatgataatacaactgtttattcataacttcacttttctctcagtagcatataactactattggaaaatatacttatatatgcatatattcattctttttctagaaatgtttacacacatgtacaacatacgcatacattctactttcttttaaaaaattatacatatgtctcaacctatacatgtaaatataggatcaggcacaatagtgtccgaaagacttctgaagtcaggtgttaaagttctacagcaacaaagatgatctgaaatgaagtccaccaacaggctggctctcagcctagtcctgccctaggggtaattcttgccatttcagtctagcccctttacccctcttccactgcacagcccctcctgctgcccccaaggctgcccgctccccacttgcagacaccttcaagctctattcctcaggttcctaaatgacttccttgccctcttcttctcccttcctgccccaaatacctcctcctactccttcaagtgagatgatctcatctaattgttaggaacaaagtctctgattgaacagtttcacattagagtgtgaattacttcaagtggtttaatatgttaatatatcaaggatgtctgaatcttaaaagaggagtttgttaaactgaaggcttagatatttaactaatccaagaactaacattttgtgggggtggggatatggggtccctacttcttttaacagtaaggttggtgttgatgtgtttaaagctgccttgaaaacaagcaataataggtataaaataaattaatatatttagtaaccagggattatatgtgtatatatatattttgagacagagtctcactctgtcacccaggctggagtgcagtggcacaatctcaactcactacaacctccacctcctgggttcaagtgattctcctatctcagcctcctgagtagctgagattacaggtgcgcaccaccgcgcctggctaatcttttgtatctcgtagaaatggggtttcaccacgttggccaggctggtctggaactcctgacctcaagtgatccagtcgcctgggcctcccaaagtgctgggattacaggtgtgagccactgtattagtctgttttcatgctgttggtaaagatatacccaagactgggaagaaaaagaggtttaattggacttacagttccacatggctggggaggcctcagaatcatggtggtggcaagagaaaatcagaaggatgaaaaaacggaaacccctgataaacccattagatcttgtgagacttattcattaccactagaacagtatgggggaaactgtccccatgattcaaattatctcccactaggtccctcccactgggtccctctcgcaacatgtggggattatgggagtacatgatgagatttgggtggggacacagagccaagccgtatcagccaccatgtcaggccagtatccagggattatattctttaaatcaatgaagtctttatgtttgagcacccagtactgtgggtgttatgaagaaacgaaaagtgtgaggcatgaaataatcaaataattattggctgggcatggtggcttagcactttgggaggctgaggtgggtggatcacaagttcaggagtttgagactagcctggccaacatggtgaaaccccgtctctactaaaaatacaaaaaatagctgggtgtggtggtgggtgcctgtaatccaagctacttgggaggctgaggcaggagaatcgtttgaacccgggaggcagaggttgcagtgagctgagattgcaccattgcactctagcatgggtgacagggcgagactccatctcaaaaaaaaaattattattaaggattaataacaggacctcatgaaagtgtaaggttcttgaggactggggcaatcagcagagcttcatggaggagggagataagaccttgagatgataaaacttgacaagtctgagggttaaagatgctgctgaggaggaaggtgaacagcatgagagaaggcaggttgcgtggctggcaaggtgcttgtggatagtgagaaccagcttgattggaagagaatgtgtgtgtcaaggaatagtgagaaacctggatgggctctgaaagctaagcagaagagtttgatcatgatgttataagcaaccctctaaattcaatttagtcatacgacgttttcagaaattaagacatcatcaaaagatataaaataaaaaatggaaagtcctattgcccccaaataatcactattacccatctggagacctactcaggacatctttttatgtatatgacatgctgcactcttttcatttattatatattagcaatcttgcctcattttcaaagagatctacttcattctttaaaaatggcctcataatattccattgtgtggatgtgtcataatttgctttccccagctttttgctcaaacaatcctgcaaagatattgtatagacttgcaagtatatccagagatagattcctgtcagggggaactgctggcccaaaggttatgtgcatttgaatgttggtagataagaccatactgccctccacagaggccacactggtttatactcccagaaatggggcacgagcctgctggtttccctgtatcttcatcattgaccacgttttcaaaatgaaaacttatactggtcgggtggcagtcagtctcttcaaaactttggacttctgatttacatttatttgattatgagtaagaatgagcattttttttttcataagtttgctggacattgatgttctatgaattctgctttcatgttctttgctctttttgtccactgggttgttagttttcctattgatttccaaaccctctttgtaagacaaggacatcacagtgatttaagatttctttggcagagttcttcacactggactgaagctgagagccttttggcagggatatcggctgagaggaggctgttttaaatcaatcgcaagttgagaagggctccaaatagggtcatatcagaggaataagaaatacattcaaggactctggtgagagacttgagataaattgggatgaaggaaagaaaggacaaagatgaactcaaagtttctaacaggaaacagaaagactggaggtaaccctgatagactggaaagaagggccaatttggaagggaagatcacaactcaatgttgtagatggtgactctgaaatagtagtgcatcttcaaaagaagatgatttacaggcagtgcaacatataggacccagctaggaatcaggccagggcttctgggaatcatctctatagaagtgacagctgacatcacagaggagatgatcttagtgtggaaaagaaaaggagaagcaaagcccaggacatagactcgaggaacacccactgggaggaagagagactagcagaagaaagacaagtaaaagaagtatcatataagctaagataagataagggttggcaaactacagccagctggccaaatctagcatttaccttggttttgtcaataaagttttattggaacatagccatgcccatctgttgacatactgtctatggctgctctcaggccacaacgttaaaagctaaatagcttcaactaggactatatggcctgcaaagcctaacatttttactatttggccctttacagaacaagcttgacaatgcctgttttagaaggaaaattgttggtcaatcaatatagtcaaatgctgcatagagctagaggatgattagaagtagaaaaacactgtggaatttggagaagaggcgataggttactctgtcaattttctatattatggtgggattacaaaagggactttaagagaatagatggaagagttgaatcatatacacatcagaaaaagaacaagaggttggtagctaggaagggttgcaagagaaacaacgccatacagtctatccacttgtctagagaccacactctgcttgttgggcttagctatgactatagggcctggagctgtgagtcaatttcatcaaggacatgggagaaagagaactgttgtaccagtggtacttgagtaaatgtattcaagtacatttcctgcaccttatgccattgtggtataattgcctatagtacagcatgttactatactgtaacattactgtatcattactgcactataggcaattatataaatatatctaagcaaagaaaaggtacagtaaaaatacagtataaaagatacaaaatggtgcacctacatagcgcacttaccatgaatggagcttgcgggactggaagttgcacttgtgagtcagtgagtgagtggtgagtgaatgtgaaggcctaggacattactgtacactactgtagactttaagatactctacacttaggctatgctaaatttataaaacaacattttctttcttcaataatgaattcatcttagcttactggaacactttcactttataaacttaaaaaaaaatttaaactttttgactctttggtaataacatagcttaaaacagaaacacattgtgcagctatacaatattttttcctttcttaaaaatttatttttatttgacagataataattgtacatattccgtttttctttatatccttattccataagctttcttctattaatttttttgtttttactttttaagctttttgttaaaaataagacaaaaacacacacattaggctaggcctacaaagggtcaggataattaagaagttactaggtggtaaggttttctcatcatttatttcattgtaatcttatgggactaccatcatctatgtagtccatcttgactgatatgttgttatgtgacatatgactgcatacataaatatgtgcatatacacctatgtagcatatatgaggctggtgcaaaagtaattgcggtttttgccattaccacaattacttttgcaccatctaatacatattaaattgatcattcagtaattttggttgctaaggcttacatttatgtcattcaatgatcattacgttcattatactgcctttgaactatctccgatacagtttagcattattaaagattaacaatgtccaagtagttttttgttaaatttttaaaattaaaaaactaaaattatccatatatattccaatagtttactaaccaaagtacttcattttggaccatgcaataatacaattaaccaccagcctgggcaacatggtgaaaccctgtctctattaaaaatacaaaaactagctgggtgtggtgacgcacatctgtaatcccagctactaaggttggggtctgtggagggaggatcgcttgagcccaggagttggaggctgcagagagccaagatcgtgccactgcactccagcctgggccacatagcgagatcctgtctcaaacaaacaaacaaacaaacaaacaaacaaacaaacagaaaaaccaattaaccatatatagtcacctagtgacttccaaagagtacaatttagccattggtgaagaggaatctactttcacctgtgttcttttgatcacactcttcctactcacatattcgtgtattcgctcatcaaaccttaattgattccttaacgtacacaaggcaatgttccaggggctaaaaatatctctcatagcacttgaaggattttgtccactgaacaaagaatcttatttgactagttttaaaataaaataaaaactgccagagaatagaatcggagggaagctttggggtaaaaaaaacttttgagagagaactgttcctttcttctccgctcatttattgctattgcttctccttgctctaggaagcaaggtcataattcacagccacagcatatccaagcctatcttccagagcattcttcctgaaaaatggcacttacgctttatgctactatgactgaatggctctgtctttctttctgagtgagcaggcaaaccttcttaggtgggatggaaaatacatttctattcttagcattattaattctaattcaggagggcacaaagaaaatgccactttccttgtgccctacggacgtgcatacaggggagacaggaattaagtaatgaacaggtcccaaacaatgccatttgatgctaggcatcgagatttcttcctgtttctcaatgctactaaaacaccacaatgaggtttgtaattttattccttgggaaattgattcctgtaagcttttaggacagtaagaattgcccaatcttatgaaatattctacaacccccaccccccgcccccaaccaagcccttctggtaacacagaccagattgctagatgtcctactggcagctgaccttgtcttgtgaactccagtcagtagccaagggagagaagcatcaatgctgtaaaatctcttttctatgcctgcaagcaaaaattttacaacatttcttcttgacatgaaatctctgcttggacatctggcttcacagtgagaaactttcaatacgctagcttcaaagaaaggacttagccctggtggtgcagtgatgccagaagaatgttccacagtctctttaaagaactatttctaacgtttccccaaatgaacttctgtgagctcagtggatagtgccaactcacatttagataacttggctttggcatacagccttttgtgggcattgcccctggagtatacaaattgtgttcttagataatacaggcataccgcggagatactccaagttcagttcctgaccactgtaataaagtgtataccatgataaagagagtctcgcatatttttttggtttcccagtgcatataaaaaagtcatgtttacactatactatagtctattacgtgtgcgatagcattatgtctaaaagaacaatgtatataccttaattaaaactttcttattgctaagacatgctaacaatcatctgagcccccagagagtcctaatctttttattggtggagggtcttgcttttgatgctgatggctgctgactaataagggtggtggttgctgaaggctggggtggctgtggcaatttcttaaacaagataaaaataaagttcactgcaccaattgacttgctttcacggaagatttctctgtagcatgcgatgctgtttgatttaaccacagtagaatttctttgaaaatgggagtctatcttctcaaatcctgccactgctttatcaactaagttgatataatattctaaatcctatgttgtcatttcagcaatgttcacagcatcttcaccaggattagattccatctcaagaaaacattgtctttgctcacccataagaagcaactcttcattcaagtttggtcatgaggttgcagcaattcggtcgcatctttaggctccatttccaattctagttctcttgctattctaccacatctgcagttacttcctcaaagtcatttgtgaaagttggaatcaacttcttccaaactcctgttaatgtttatattttgacctcctcccatgaatcaaaaatgttcttaatggctctaaaatggtgaagcctttccagaaagttttcaatttactttgcccagttccatcagaggaattaccatctatggcagctacagtcttatgaagtgtatttttgacataagaagacttgaaagttgaaatgactcctggattaatgagctggagaatggatgctgtgttagcaggcaagaaaacaacattcatctccttgtacatctccatcagagctcttgggtgaccaggtgcatggttaatcagcagtaattttttttaaaggaatcttttttttctgggcaggaggtctcaatagcagacttaaaatattcaggaaaccatgctgtaaaccaagctgcagtgcagcctttcttgttccactgaaaaagcacaggcagattagatttagcatcattctttagcatcctagggtttttggaatggttaatgagccctggccttagtcaccagctgcacttgccttgaacaagagagttagcctgtcctttgtagttttaaagcttctctagtaataaaagtcctagatggcatcttcttccaacagaaggctgtttcatctacacagaaaatctgtcatttagtgtagtcaccttcatcaatgaccttagctagatcttctgggtatcttgctgtagcttcagcacttgctgcttcaccttgcatttttatgttatggagatggcttctttccttaaaccttatgaacaaacctctgctagcttcagacttttcttctgcagcttcctcacctctctcagccttcacagaattgaagaaatttatggcctttgctctgaatcagactttggcttaaggaaaggttgtggttagtttgatcttctactagactactacaattttctccatatcaccacaaagctgctttgctttctgccattcatgtgttcactggagtagcacttttaatttccttcaagaacttttcctttgcattcacaatgtggctatttcgtacaagaggcctagctttgggcctgtctcggctttcaacatgccttccttactgaacttagtaatttctagcttttggtttaaagttagagatgtgtgactcttcacttgaacacttagaggccattgtagaattattaattgacctacatcaatattgttgtgtctcagggaagagggaagcccaaggagatggagagagatgggggaatggccaggaagtggagcagttaggatacacacaacacttattgtttgttgtctcccatgggtgcagtttgtggcaccccaaaacaatgacaatagtaacatcgaagatcactgataacagatcaccataacagatataataatgaaaaggtctgaaatattgcaagaattaccaaaatgtgacacagagacacaaagtgagcacagcacatgctgttggaaaaatggtgccaaaagacttgacacagagttgccacaaaccttgaattgtaaaaaacacaatgtctatgaggtgcaataaaatgaagtgcaataaaacaaggtgtgtctgtatatacaaggcgcacgatatttttttagaatctgcataattaggcaaaatatatgacggttaccacaagatctgagttctctccccatatctgctataccattacaaaatatttatgagcttgctgccactaaaaataaaatgacatgagaataaatgacactatttgttatcagaaccttttatgatttatgagggaacatcattcatttattctgtgtatttccagcacttccatcgaaacaaacattgcactaaagcttgctctcaaaaacctcacagtctagttggtgagaaagacaattcatctaaatacaggtccacaatgttctatctgcaatcctgaaatccaaaagtcctccgaaaaacacaaattctttttgaaagtctgcagttaacttctttgggaacaaaacctgactgatgttgggtgggtacttataatctctacttgtctcattcactggggacactcacacatttcactgttcctgtatgtgtctgagtagactgtgctgtcccaggacccactgcagatacagcacaagcaccactttcctagaacctgcagattcggactgggtgagggattgtgggtcagcactgtaatacagcaaacacttcattagagggatgaacgaggttggcacgagtttctcactctgatgcttcgcagaaaagatgaccttaagtcaaagggaaaggatactttacaaagaactcatgggcatttcccatggggcatgggatcatagagaacatggcatctatgttgagcactggcagctgatgagggagactggagggtgatgtctagacaagtggttctccaagtattgggtttcaggattcctttccactcttacaaactgacaaccccaaagaggttttgtatatgtggattacatctactgagtttatcatattacatattaaaactaagaaatattaaaacattttactcattaaaatagtaataaactcattatgtgtaaacataaatataatattttaatagaaaaataactattttccaaagcaaaaaaaattagtgagacaactagctatgtttcattttttgcaaatcttttcaatgtctgatttgatagaaggcagctgattctcaaatatgcttctgctttcaatctcttgcaagatgttattttgattgaagaataggaagaaaatctagtctcacacagataagaagttagaaaagggaggagtattttagcagcctttttagatgactgtggatatttttgttaatatgccaaaacttgacaagtggtagcttcttaaaagttagttacaatgtggaatctgaaactctatcagtgagcttttcatactattacactaacatccattggtctcttttgtattttgaatggatcttttactcaggcatggttttgtaacatcaggtgtttgtcatttggaaaacatggttctgtgagttatacaaatcttccaaatgttgatacacttcattctcttccttcccctttcttcccattcacatcactgataatatcactgatcttatcagaaaagtctgtaagtattgtgaggctgtcaggctcacagtggtggtattagttttccaaaattctaattttggcttgaaagcttaaattttatcattagcaacaatatagtcagttgttatccttgaaatgccaggcttgtttcatttcattcattttcaagaaaacatctgccaaatactcaattgtgaataagcatagcttgcctgtcaatcgttctttcagagtgactagagttcagctcatactcatacagacacagaactacttttctctaagacagccatcctacttcagtatgcagcagaagtgcttcatgtgtacttcctactaatgttaaaagagatgtatcctcgaggtttgagatttaacaaaatcaatacagacgctcttcaactaagatggtgttaagtctcaataaacccaatgtaagtagaaaatatcgttaaggtgaaaatgtacttaatatcctgattaacctatcgtaaagttgagaaattgtaagttgagccactgtaaatcagggaccatctgtatattttattgctttttatttttaaccataagtacatggtagtgaagaaaataatgactagtcatatggtttcatgttaaagccttgttttgtgtgaagccaccagcagttttacccaccactgcttctatatcatctatgcaagtatcaatatagtaaaaatggaaagtgatatctttgtgttattatgaaaatagtttgaccttgtggggccattgtaaaggtctcagggactcatcggagtctgcagagaataccttaagagctgctggtttagatcataaagtgttttgtatgccatattgacaagtataggttttatcctgtaggtaatggaaagccattgatgaattttaagaaaaaacaacatgcccatatttgcgttttagaaaagttaccttatcagtagtgtgaggcatagatttgagagggtcgagttattggcagtgattctagataagggtgattgtgctaggcaaggtcaaagatgatgatgatctgacctagaaggtaggatctagtgattggggaatggggtatgagtttggagatatttaggagttttctctaggaactgacctatgagaggtaagggaaggaaagaattaattcagggggatttctagggaatctgacttccgtgagtaggtggatgacggtggtactttaattcagataaccaatacaagaagaagagcaggctggggctgggagaagagcaagaggaagattaattcagtttatgacagctctagattgtacagtctatggtccatccaaatggaaatgcccagtagtagtcagaaatgcggattgagggctcaggagaaaagtttgaatggtgatgaaaattcaaaattcatttgtctggaagttaacatgaagggatgagattgtccagggacaatccagtgtatatagagaaaacaaaataggccctaactaataccattatttcagtgcaaaaaagaggagatgggaacaagaatgggaaagaggggttccgaaaggtagatgccccaggaaagtgctgccatagagctaaggaagtttttagaggctagtcatgtgcagattagatcgttgttcacagatgttcacggtcttctaactagagttagtatgtaatttccctgcctcattgacgtggacagaaatgaggctgaggatgcagggatttctttcaacccatcctcttgcacttctgtaatctaccattaacaggatattccggacaactactagtccaagctgactgtacagacatctagagctggcctgaatctgatctaaagcctggagtcaaacccagtcagtcaatgcacattctgaatttgagccacaacagcgacccgcagacatgttccaagaaaaataaatgtgagtgaaagtcactgagtctccaaaagtgtttgttaggcagcattattgtggtaatatctgagcagcagaagatccttgttaaatgttataaagaagtcaaatagacttctcaagattagatagtagattgaatgttcctctcccaacaccaaataaaatgagtaaagaagagtaaaagctagcaaaaatgcaccaacagaacaatatcgggtggtaaggtagacatcatacaaaaaaccatcaaaaacctggggtcaaggaaagaaatgtaattctggagcacagtgaagagttgcacaggggctcaacttcaaaacttgcccatgcccctaggatcattatgttgttatgagtcaaaattctgagaattttcaatactatcaccaaatctggagagaagcaaatggcatggcagcctcattttttcctcttctggctgacagtaggggagacggatgtggtagaaaaacagataaatatcagggctggctacctctgaggaaaggacttcagagatgtacaccaaattgggatcattacaaactcaaaggaatagaagatgccgcttccatgtaggtagtgtgaaccctgaaacacacttaacataatctcaaagtgagaacagtcagttcagccagatgcatgctggcttgtgcgccagctctgccttccccttccctcaggtcagagaacacacagagacactacaagtcagtttcacttacaaggagaaccactatgcttcagaaccatttgctattgaatactgaacatgtagacatatctcagtcgcttactgaatttatcctggttaatctactaaacttacatgagaaagaaagacttcttcaggaatgcctcagaaaatgcaaatcacttctaaggaggtgcattcagtctatgtctgttggtctgcagacagaaaagtctgcggggtcatgtctgctggtctgtctagcccaggcttctcatagcaaccttaaatgctcgatgagccgtgtttacacataggaagaaaatgtgaacagaaacaccgcacccatgtaacatgccattcaatcatacaggttagccagaagacattcttaaacatgaaaaaactcagggaagacagcaccatccaatcaattaagaaacaaatcaaagtaaaaactgtgggaatggcgccactatggtaaaaggcctagtataaacactgcatagattgaaatatagcatgagaattaaactataggatatggtttaaaaattgtgaatatcataaacccggacagtgtgaaaatactactactatccaaggtaggaggtggcagggaagggttacggcagaaagtataagggtgcaaaagtacacatttttcagccaaaatcaacatgttctgtccaaaaattcaacaattcctctgttttactctagtttcttttgtctgttgaattaaagtaaaattaaagatttttctaaaacaacaaaaaaaatcaatagtattcatttcaaaagcctactcggctttctgttctttttcccttatacatagtaggatatcagaaataatgtttaccttaattctatggtggttatttctgggtgataggatttggggtgactttaaaaactgttacagttttttattcttgcattttaaattatttataaatgagcatatgacatttctactacttcaaaaacaagagaatagattttctttataaaaaaacatggatgcaaatatgccgcaatgttaattaatgttgattacaggtagtaggaatatagatattttcctctttgtactattttgtatagttgaggaataaatgggagataaaaaccggacctttagtatagactactgtggtagatttaaaatggcctcaaattctatgccattcctcccactatttctcctctcctagattggccactatttctcctctcctagattctgggctggccctatgacctatcttgatcaatcgaatgtggtggaagtgactttgtgactcttcctagggcagggcttaatggaaatacaggttctgcttttaccccttttaattatttctctttgacatcagctactaggtgaaaagtctgattaatctgttaaaaaggccatatggcatgggcctgaaaccagctcagacattccaaccccagccaagctttctgctgaatgtaacctcatgaggcaccccagccaatgccacacattgagcagatgaaccacccagctgatccctgcccaaatttctgatccaaagaattatgggcagatagatgttgctctaagccatcaagtttttggagtatgcagtggtgataattcttttgaaaggtgtgactttgaacataaggagtgagctaaggcagtaaataagtgataaagaagatttttttgctcttgatttttaaaagatagggtgttacagcataaaagatctactcttgccaggtgtggtggcttatgcctgtaatcccagcactttgggaggctgaggtgggcaggtcacctgaggtcaggagtttgagaccagcctggccaacatggtgaaaccccatctctactaaaaatacaaaaattagccaggcgtggtggtgggcacctgtaatctcagctgcttgggaggctgaggcaggagaattgcttgaacccgggaggcggaagttgcggtgagctgagatcgtgccactgcactccagcctgggcaacagagcaagactccatctcaaaaaaaaaaaatctactcttacgaattttgttcgtttgtgtaactctttttacactaaaggaattctgttttctaaaagaccttacttcatctgttgtttcttggacagtgaggatcatgcctgctgttagtctcacctaccactattcccataatgttcaatggatttcttcaggctggtagcttttccctttttaccaaacaatttttattgcttctctgtgcaaaagtgctattatagtttaaatatagataaaattaaaaaatcataaattctaccactcagagatatccattagtaaaattttgatataactgtagtctttttttctcttgagttatacttttgttttgcaaaaatgagctcatatctatatgttttgggatgtgcattttcactgaaaaatatcatgtgaacattttcaatatccttatatatgctctccaacgtcatttcctatagtgcacagttttcagtgtatttgctatagttaaaaatatagaaaggatatagagaatgctggtgttgcaggtacctgtcacataagaggagctaaataaataactattgactgaaaggatgaaagctagaacaagcatctttttgattagctaaagcttagtgcgattattaattgccacctttgggcaaattctgaaaatggtcaaaggctaggtatatctctcaggcaatttaataatgataggtattgccaaattatcctcaagaaatgttttatcaagttatattgcacctgactggtgaccctttaagtgggtttcagtatacctcaaattttctctagaattactttaatgatttatctgaggaagcattattataagctctgacagaatgagtactaggtttactctctgtctccattcttgatcaccagcttgaaagaggtcagttcatcatcaacccagaagtggagtgaagtatgtctcacaattagcatgcacgctacttttatggcattattgaatatatctgcagacaaatgtatttggtcccagaaaatcaagcctcatagtggctgtgcctctctctgagtatcaatatctattcatgtacctaaatctatgtgtacaaaacacttaaatataatcagaatgtccaaatcaaacacctgttgcaaaaatgttatatcattcatgcagagagaagaatagaatgagaatatctatctaggttcattttggcacttggtcatttgactcattttcatggacagaatgtagtacactggggtatggtataatagttaatagttgaggctctcaagtaagacagattgtggcttgaaactgcctctgccaactgttcagcaggatgatcttgggctagttatttaacctcatagtcacagtttccccatttgtaatatggggatgacagaaataccttcctcatgaagattaccataaggcttaaatgagataatggaacatgagatgaatgaaaatggcagagcctggaacatagtacgtgatgagtaaatatcagctgttattcacagtattttttgtgatacagccttaaaaaaagagccaaggcaataaacactaatgaatcaattaccttagcaactttaatataggttagtaaaaaagaaatgtcatttactttatgtataatctaagtgagtgaatcaaaacttagctatatcttacctatattgtaattttaatatttttcaggtaacatatggtacatatagtttttatatatattataaaactgtaagaattaataactaaattattattaaataatttaaaaattaagtaatttaaaaattaaataattaaaactgtaagaattagtttaaaatgagcaactgtactaattataattctttcaagatttttttaatcatcaagaaacaataccagaactatgctgtcaggagtatattcatattttccatttttgcttatatttagatttgattgctcatttaaaatttggatattacctactacttggtatttggacataaagtgaaacagaaatgcacttaatatttaaattttatagaactaaaacaatttaaacaaaatatgcaatgcagtttatgtgaagcaaaacagttatatagatcaatggaggcacttcctgtgcatttgtaaatgaaaaaaacttgaaagatgtttttaaaccaccagaatatgaaaaaaaaatctctcttttttttttggtcttataacacaggtaggggaaataagcttgcaggtggaaatacataggaaaaatgtcattaaaaaaaaaaaagtcctcaatggtaaagtgaagaggccggatgtaatggccttgaaggttttatccatctgttaaggctttttattctatctagtgttgtctcagcttaaagggaatatataaaaagcaactgacattaacactaactcttcccaacgttactcagattgcctgcaacaggctatagaaaaagaagatgcagaggtgaggcaggaaagggcagctgtaaaaccccaatttttcttttattgttctttgctttgtatgattactccacacgctttaagtattgttatgtcaaactaaagtcgctgaaaaataatcttttgctgggaattctttaaaaattttttgttctcttttaaaccttatttataaaggtttccagatgcttatcctcacacattaaacccagtatgatgtagacacatacaataatattcactgctatgaagccaagaaaaaactacttgaagatctaactgcctatcactgaaagaatcggggtccagagaattttctggtgctattaagggtgtgattctctgaagtcatttggaaacaacctagtttctcagcagcaacacatctatcctgtactgtgtcaaagcacatcaaatggttggcattccaagcatcgaacaggttatttctcattatgcgaatacataatgaaaggatgtgggcaaagaacagaatgcaaattggaagctgacttctgactttaacagccagcagtgctgggctcaaacagtcattctaatttcaagagacaattccaaagtggttctcaagagaaaggacagagtatttttaaaatatttgttcaatgtgaatggattgggcttgccaaaaatgactttttatgctggcatgcgatctcttagagggaagtcagcctgagtcactggatacatcaaaggtagagtccagtgaatggaattactgcaggctgtgtgaacaagccagatacccgcattcatctgcccactgctgggatttcagccctccttttaattacattaaagcagctggtaccactggttactgaagtcttcagattaccttgattgcttggtcattatctctaatcagctgcttcttctcatcttcaaacttttgtctaacatcctggagccgcctttctgcagcaagctgctgctggctgttctcttctttcagagaggaaatggttgtctgaagttctgctatgatctaaaatgaaaacagcatgctataacttcaaattcttctgggagaggcatctattttatatgtattgatgcttaacaaaagaatggatttgacaaaactctattccacaaattaaatattttcaattaacatatcacacactataatgcatgaaataccacacaataaaagactttaataaaaatgtgaatggtgaacaactgctgaaccaaatatacttggaagacgtttccactctaacattccacaatatttactcatcagaagaaagaacatctgtgatctcaaaaatatgaaaagtgtcagattttattttactgagaaatatacttattagaatgagaaaagctattctgcttttcataatactttgaactgtaataaccaaagaaaataatgaacagagtttattcttcagtcacctaattctatacagtaatttttgggaattcactaatgtttgtgtattgtgtttaacactttaagttcttatgtcatttactactgtgaaacaggtattattattgccttttatttttttttttaattttaattttttttgagatggagtttcgttcttgttgcccaggctggagtgcaatggcgtgatcttggctcactgagacctccacttcctgggttcaagtgattctcctgcttcagcctcccgagtagctgggattacaggtgcccgtcacgatgcccagctaattttttgtatttttagtagagatggggtttcataatgttgatcaggctggtctcgaactcctgacctcaggtgatccacccacctcggcatcccaaagtgttgggattacaggcgtgagccactgtgcccggcctgcctatcttttataaatgaggaaacagaggcacagaaagaggacaaataccttacgttgttgaaaatgacatccaactaaagagacaggcaggatttgaaccatgcagtcagaccaatcactgcactaattgggtcctttaacctgccgactttatgggtttttttgtgttttttgtttgtttgtttgtttgtttgtttgtttgttttgagacggagtcttgctctgttacccaggctggagtgcagtggtgcaatctcggctcaatgtaacctccacctcccgggttcaagtgattctcctgcctcagcctcctgagtagctgggactacaggccaccaggcctggctaatttttgtatttttagtagagacgagtttcaccatattggccagactggtctcgaattcctgaccttgtgatctgcccgccttggcctcccaaagtgctgggattacaggcgtgagccaccatgcttggccactccgttatgtttctttaaaacaaggttttggtattgcagggaagtttatacttccaaataggttgtcctcttcctaactcatggatagttattttggtttacatggtgccattttcattcactcctgtagtattccctgcatttaagaatctgttctctccagacagcgttcttctaacttctcaaattaaccatctgatgagaaacttttatatttaattggccttatgagagcactgtccttcctttggtttggatgtatccatttccttgcaaattcaatagtgatgactttttaaaagcaggaaatagttgtttcttctaataaaagaaacaacattagacccacgttagaatataattcttttggtcctaagcagaggggagggcagttggtgagaaactctggacaagttatctttcttgaagctcagtttttccaactattatttggtgacaaaacaagattacagcattataaggcaataaatagaaactgtctggagtcccccagaggccaaatgctatagaaatactagttgttactactgacataaataatagcatcttgacaataaaatatggagtatttatgctttgagaagtgagcaaattcactataccaaagtttgacacttggaatttgtcaataatcaaatatttagccgattgtgaaatgacaaaatatataataacaacatgtcaatattattacatgcaaacttcagccttctgctatgagtggaggcattcatttactgagaatgaagatgttttcatccattttctgaattttgattaaatattgtttccattctggcatcaattcaattaattctcatagcacttctgtgaaacaggaaaggttaaattctcatagtaaatgtcaaaaattgatgcagagaacaatcaactcacagtcacagagccagaggagccagggataaaaaagagtcagatttccttggcctaatatgaaatttaagattgatcttttatgagaacatggggccaaatagtaaaaaacaacttactatttcaatgttttaagctgagtaaactataactttgtagaagtgggtttaattctggagagagaaggagggcaaggcagagaatgacagagagagggtgcgtgtgtgtgtgtttagttctgcgcagtttaacacatgtatagattcatatatccacaactgcagtcatgtgatatatttttaaagtacaaagtaattttttctttaaaaaatactaagattgagactagcttgtaactgaccaaagaataaagataaaaatatcctgggatacttcaaacggtcaaaggccatggaacagggacatttctcattttcagaacatttaggacaaaataattcaggttttgaggcggccggatcacctgaagccaggagttcgagaccagcctggccaacatggcgaaaccccgtctcttctaaaaatacaaaaaattagctgggtgtggtgacacatgcctgtaatcccagctactagggaggctgaggctggagaatcacttgaacccgggaggcggaggccgcagtgagccaagattgcgccatttcactccagcctgggcaacaagggtaaaactccatctcaaaaaaaaaaaaaaaaaaaaaaagaaaagaaaagaaaaaaatgcaggttttggaaaggactacaagtgaagtccaggatgttctaagaaggacgtgcttgcttttgtgtggaaaataaaaccttacattctttgggggaataaggagagattcctctggggaaaataatgagattatttttggaaagatatttttaaaacttaggaaggcgatataaggggcagaatgttaaaacacttcaggtgaaacacttggctagataaatagataaattatttggttaaaagactcacaggtgatacggatatggaacagtaactaaaataaggataattaaaaaaacaagatttaatactttaagattgagaaataatcataataatcagattaacatgcttcaggtaaggaacaaaactctactggttgtagacccagagtataagaaaatggactactttctccttagctcagtgtatgtaataactggcacccagtttaagtggtagaactataatcatggtaagtaataaaaagccatcacctggcaaattgaattcagataacctacccttctcatagaataataatgttaaaagtttctaagaaaaatgaaagctaatatatacaatcataatcaaaaccctccagttttgattgaatcataattaaaaaccatagaacaaaatgctagcactcaactaaatgtttatactgtattagtttcaatgaaagaagcagattagagaattttcatatggatattaaaaattagtattttcagaaacaaaaaggagagctattttgagctgatggtgtaagcatccgaactcatgaaagtcataatagttaataataattgttaagcaattaacgctttgcaaaaatgttagtggtcttaaaaaaaaaacaaaaacaggatcctaaataggggttaggatttcatcttcaactcattctattgcttttcagtttgtagtacagtttgagacttttataaaactcttctttaaaatataatacaataaagaagacaagctacttaagaagccatgcttaggaacgttaggtgaacactgacgctcctcacaaaataagtggatgccttgtgcattctgggttggcccccaggaggctggcatagagatgggcacaggggtcatgtggaatattcccaggtactaatatgcatcaggcattgggtagtgtgggacagtggtaggagacactcgtcccttggcagcaggcaagctcaactgacattccaacttcagtcctgcccatgtttctaactatggacattctggcaaaatggcagtatctttccttgaaaaatggccactaggtgactaggctgagtggggaaaactatattaatattgaagaggcaaggttaatacataatcacttattatttcaatgttttaagcggactaaactccagcactcaccaccactgcagtgtatgcatcgtctccattcttttcttaagataaaaaaaaatgtgattctgatggaaatgatatttgggggcgtgcccagagatgatgcaaacactgcagtggtggcgagggtgagtgctgcagatctcagaacggggcacaggtctcaggtgtgccaaagtttcagtgtacacggtctattaggtcctacaggcttgataaaatcatgaaaagtaagcagcttcctctaaaggaggaaaatctttaaaatattttccaaatttaatcttatgctctctgaggtaccaacacattcattactaatgcattcattttctttttttcagagagggatttttaaaaacccaacagagttaagcactttgcttttagtgttctcatcagcctaatgagatatgagttagagattccaacaaactatcacttaaatatggagagatccaatccacagtcttgttttataatgctcatttttaaataatctgacatgcttctctgaactgactggcattgtagactaatgcttctcaaatgccagttcacagatataaatatttagaagttggcaaacaaaatattatcaatgtaaggttatcatcctaacttttatgagaaggatggactatctttgattatattacatcctttctaagaattttttggtgttgcgctgtcccttgattaatgaaatgatggtaatagtatatgatagttgttactagttgctttttccttctccaccttcaagtcttttcttgggaaaacagttagcaaccctgtgcctctccaagcttttcagggagattttatcaccttgtgaacacccaaaaacatggtgtctgaagcaataatttgttccaccttccaaaccttttttcattcttccctgcctcctttcctctttctctatggcaattttagtgctgatactataataattcacattcgttaagtgctttagtgtgtactaggtactatactgaacacatttttggcattgttttacttaatagttaaaaccatcctatgaggttagtactgctcctccatttgacaaatgaggaaattgaattccaaagagggcgggtaacttgctcaaggtcacggaagtggtagggctggtattcaaatccaggggtgctggactccagagctcaggctttcttctgcattaacttacatttaatttgttttaacatcaactaatcaggcttcttcatacattcctttagataaatactcctgtttacactctcattatttaggcatttttattagctatcttatatctcactctcggtctgcttcccccatttaacgtaaagcgaaataagcaggatgttaggatatgccaactggggatttttaatgttttaatttaaactttaacttttggcctaaatagatttcttttgattgcaagaatctttttcagtggattaaaaggatatttctccatgttccttcctcaaggaagggctggaataatggcaatcaagacataatcatcatttcttacataaacatatacgactcttcatttggacaaagactttttgcttttctaatgggatgtgaattagtagaactgaaattttaggccaggtgcggtggctcatgcctgtaatcccagcattttgggaggatgaggagggaggatcacctgaggtcaggagttcaagaccagcctgaccaatatggtgaaaccctgtctctactaaaaatacaaaaaattagctgggcgtggtggcgggcacctgtagtcccagctactcgggaggctgaggcaggagaatggcgtgaatcagggaggtggagcttgcagtgagccgagattgcaccactgcactccagcctgggcaacagagcgaggctctgtctcaaaaaaaaataaataaataaaataaaataaaataaaaggaagggattgggccaggctggtagtgttaaggttaagaacttccactttgaagtcagatccagactgggtcctggctgagtcacttgccaacttgtgtgatcttatctctctaaatctcagttttcgcaaatggaaaaatggcaccagtaatagttcctaattccagagttattgtgaaagactgaatgagtcaacatggttagtgccccatgaacattagatattattatctttttgttgttgttgttactactattatgtggcattatgtggtagtatggtaaattctagtttactaaccaaataccactgtatatatatataaaaatatgaagacaagctgattttaacaatcattagatatgctcacaaaaccaaatggcttaacttacctacctgcaaagtaaagataagtagtatttatttgttctagaatcacttatacaagtaaggaatacttggagttccttaaatgatactactggatatcactataataacttatgctgaaaaagtactctgagcatcatatttcaaatagagacaggcattcaattattggcctttcttatactaaaactacaacagtaagtacaaatagcaagttatggatgtagggacttagaattctctttgtcctaaaaagagtcaacagttgagccgcagacttaacctagaattatttgtcattttgaattttgtttgaagaagcctttggtagagcaaaatggagtattaccaaaaaagcacagatagtaccaaactgcttacatcacaaatgtaggtgtgtatctcctgtccttgtgaagtatgtttcagcctgggcttgttcaagtgtataggctggttttacaacatctgagagtgtgtgtatgtgtgtgtgtgtgcatgtgtgtgttgtttcaaatggttaaatatgcctaatttttcttgatttttaatgactgaaatattaaaaccatattgtttatttgtatacccataaaaatatgataccattccacaaaaaaaaactgaaaagaatgaagtttaacttgaaagtgccaaggcttttatgtggaggtttcatttttgttttggttttaccctgttttgtgtcttttaatgttgcttacctgtgaagatttggcaagcttctgagtgtattccttctcaatctgcttcagcttgctgttggcctgaaaaacacatgtacatgaacacatacacagtgacctgtgagcttggtatctcttccacatgcctatcaccaggcagctgggatgcctgccagctgcaccgcccttctggggcagccagaaaaccacagggcttgtctttgatgttacgccaactattcatcacttaaaaagcaaaaaaaaaaaaaagatctcttctgccaattattagacaaacataagacttctgtggatagaaagagaaagggagaaagagagacagaaatagacacagcaaaagtatgaaggctcagaaggtaaagtaagggaaagagagaagaaacaagaggggcaaggaaaagggagagggaagtgaaggaagaagaaaggaaggtaaatttaatactttttcaccttaattaaaaaaataaaaggaatagatgcttctggacaaaggagatatgggattttgagaatcactgagcagaggtgagcccctactctgccaaatacataagagctaatttttacagtgacaaatgtatctaaatcaaacaagttttaagttttatgtcctggaaatagggtggcctttccacaatcagtccacattgcttagaacttggttatcccctctgccactcaagttccaattctttttatgtgatctgttttctgctctctggaaacttttgggatctttatttcatcgtcaaggtttaaaaatgtcacagtgacgtgccctagactgtgtcttttccccatcaatcatgcgggcactaaagaggctctttcactctgaacttgtgtcctttactactgggaaaggctggtcattactctcatgatttctctcgtctctctgtacgtctgtttctctccctgagtatgtctctccctgcaactctgattttgtacctcttagatttagtgtctctttttcttgttgtttctatgttccatttgtctttttgattattcttagaatttcctcaacttttacctaaaactttatattctgccatcatattcataattcccaacagttcctttttgttctttgaacagcatcatcattaacatccctctttttacagatgagaaaacgaagacacagagagggtaagtaacttgcccagcatcacacagctaggaagtgatgaagccaggacacaaactcacactttggctgcagagcacaggtgctccaccagtgagagcactgcgtcatgccttgcaatacagtccttctatctatctatctatctatctatctatctatctatctatctatctatctactgttcctttcatccatccatccatccatccatccatccatccatccatccatccatccatcatctgtctatatgtctataactatctatctacacatatattttaatttttttctgctcagtagagtgtgtgtgtgtgtttctgagttccctttgtttatttactttcacctgtctgttttggtctttgtctttcactttagatactttcctcaaatatctggtgatctttgatgtcctttcttattcaaagtgaggtctccaaagctggatagaagaatcttgcatatatgtatgggtttgtggatgggtgggcatcactgcagggtgtgttacaaaggggcctggactctcccatgccagcatctgactggatttccctcttggatcagtttgcccagagctgcatcctccagtttcctgccaggcagcacaaatctgatggccagtattttcagaagggcatcaaggtgttcaggagagtgactctcgtgcaaggctagcctcacatttctcctcaactgtacctgaggccctttctcattccacctctccagagaacaaaccagggatagggatgggggcagtcttgggataaaatctgggccatctgtcccaaatgcagactttcaaccaatcttccagttcttcacttcaccccatacccagtctctccaattcctgaaccttcccaaagttctaccacaggaaagatcttgctgcttctaatgggtatccttcaggtcttccttcccccagaaattgttcagtttttaggattattagttctgctaagttaatttcaggcccagcctttttcaagttctcaatgctattgatttcttatgtgtatggttgtctcttattttctttgaaaaaatatatagtataaaaatcttgatgcctgagtctcatctgcagaggttctgattcaatttatctgggctacaggctggacactaggatttttaaaaatctctgctgctatttcaaaagttcagccaaggttaaaaaccactggttcatgcctttttcaatttccttactttcattttgatgggacttcctcagggagtagagataaaaacaggtgagttctgtccactacctttagttggaagcaaatgatttgtttattttcatatcacaaatagggtgaggaagcaatcccgtgctcacagcccactccaggctcacctctatggtagtactaaggctgaattagtcattgttggttaacctgtctttttcccactagataatgagatcctagaaggcagctcctagcccctaacatagtgtttggggcataattgtccatctaatgaatgagtggatgccgtacaagccctttgcctcttctatcgcctcagtccatacctttgaagttttcttttcataaccatttttttacggacttaagttcaaaaccaattctttagagttcattccataaatctctttgtatctataatcccatcgagtacacagggtagttctgtttcttccagaatagagagggcatgtgactattgctatttttctagtaagtcatcagacttgactccagctctattatgattaaagccactctccaccagaattagggctactctgaacctcttgaggtttatttgtcttggctcacattctgtcactatttttttttgtcacaaaatgcttaataaagtatttgttgcttttaaaataaacgcttaatagaactcataccatgtcccaggcactgttctaagtgctttaaaaatattcacccactagaaaatctaaaaattaattctagtgtcataaagatgaggttacttttccctaaaaatgctagagtcacggataatagttagtgcaggaaggcctgtgtcttggtgtgagctactcttcatgagtttatggccagcccccaaatctcacaaacccaatgaagctcctttataactaaatatccaattcattcatccactctaggcagctggacagcagcaatgaacaaaacagccaagaatctctctccatttttatgaaacatctagagagtaaacaaagtaactttgaaaagttacatggtgcaaggcctatggagaagtatcaatcaagaaagagagagaggaagtgataaaagttagggggtactttataattttaaaaatactgaagtaacagatggcctccctgagagggtgacgtatgaacaaagacctgtaggagatgagggtaacctctagggaaacagcattccaggcagaaggaagaacccatgcaaaggccctgaggcagaggcatgcacagcatgttcaagacacagtatggaggccaagagcagtggctcacacctgtaatccagcactttgggaggctgaggctggcagatcactttaggccaggagttcgagaccagcctggccaaaatggtgaaaccctgtccctacaaaaaatacaaaaattagccaggtgtggtggtgcatgcctgtaatcccagctacttgggagggtgaagcaagagaatcatttgaactgggaggcggaggttgcagtgagctgagatcgtgccactgtgctgcagcctgggcaacacaagcttctgtcgcaaaaaataaaataaaataaaataagataaaataaaataaaatacaatacagtgtagaggtcagtgtggttggatcagtgcaaccagtggagcactggctccttcagacaacacagggctgtgagagaaccaggtcctgcacggtgttgaacgtgattgtaaggaattcggcttttaagatcactgaaacagagccactgaaggggtttgtgttagtccattcctgcactgctacaaaccaaacactgcatgttcttacttgtaagtgggagctgaacggtgagaacacatggacacatgggggcgggacccactggagcctgttgggggttgcggggagggagagcatcaggaagaatagctaatgcgtgctgggcttgatacctaggtatgggttggtctgtgcagcaaaccaccatggcacacgtttactatgtaactaaactgcacatcctgtacatgtagcccagaacttaaaataaaagttgaaaaagaaaaaaaaatacaaataaaaataataaaaagagaaatacccaagtctgggttaatttataaacaaaagaggcttaatttgctcatggttctgcagggtgtacgggaagcatggctggggaggtcccaggtaacctgcaatcgcagtggaagttgaaggggaaacatgcatatcttcacatgcccagagcaggagaaagagaggtggagaggtaatacacactttcaaacaaccagattgcatgacaactcactcactgttataagaacagcaccaagggggaaatctgcccctatgatccaaccacttcccaccaggccccacatccaacactggggattacaatttgacctgagatttgggcggggacacacacccaaaccatttcagggtttcagtataggagaaatatatcctttgacataggttttaataaggccactccagcttttgtttggggcaagaatgaagcaagtaagacagttaggagggtactgcaaataatctaggatggcaatagaggaggtggtgagaaggggtcagattggagaaaaattagaaagtagaaccaactggacataccgtataatggaaagagatgagtcaaggatgacttcaagatttttgtcctaagcaactagatgaatgaggttgtcattacctaacatgggaaaagttacaggtgaaatagggtttgcagagaagtttaataagtttgtacttattaaacttggagatgcctattaaatgtgcagtattgaagtatctgggtattcaagtcttgagtttatggtttaaggtctaggttaaaactatgaattcagaagtcatcagtttatatagggtgtgtgaaaccatgctactggatgagatcccaagatatccagtgtatatactggatgagatcccaagtatacacaagaaagcagaggtctaagtatactcagccctgggcctgcaaatgttaggaggctgggacatgaggaggaaacagacagaagtaatagccacagagtcaagaaatcaggataggctggtggctcatgcctgtaatcccagcactctgggaggccaaggcaggtggatcacctgaggtcaggagttcgagaccagcctgaccaacatggtgaaaccccatctctactaaaaatacaaaaaaattagctgggcgtggtggcggaagcctgtaatcccagcgacttgggaggctgaggcagaataatcactggaacctgggaagtggaggttgcagcgagctgagatcgtgccattgcactccagcctgtgtgatgcagcaagactccgtctcaaaaaaaaaaaaaaaaaaaaaaaaaaaagaaatcaggataatacggaatcttgagccaactgaagaaaagtgtttcaaggactactcagttgtgtcaaatgctacagagaggccatagaaagtgaggcctgagaattgatcacagtagtttggcaacatggaggtcactggtgataaggataaaagaaattttgttgtagtgggagacatgaaatctggattaaaggaaattcagagaggagaggcattggaatttgttcagaattttattaaaagggaaggtgagaaatgagatggaagctgcccaagaagcgggtgaatagagaggtgaattgttttgttttttggtaagttgaggaaattaacagcatgtttgtaggctgataggaaagatctagcagtagagagggaggaaaaaaaccagatgatgccagagctttcctagagacatgtccttgagttaaggggagggctatgtcatggagtgaactgtgtcctccccaaattcctatgttatgttgcaaccctaaaccccaatttgactgtatttggagatagggcctttggtgaggtaattaaggcaaaatgaggtcataagggtggggccctactccaacaggataggtgtcattataagaagaggaagagacacccatctttctctgcctgtctctctgtatgcacacacaggaaaggaaacagcaagaatgtagcaagaggcctcaggaaagcaatcctgataccaccttgatcttgggcttctagcttccagagctgtgagagaatgaatttctatggtttaagccacccagtctgtggtgttctgttatggcagcccaagccagctactacagggtgggacgaggggaggagatggcctctgctggaagtgcaggcaaatgatcccccaggaacaatgatgggagcttctgattgctctcattatctctgcaaagtaggaagaaagattcatcagctgagcatgaggatggtagaaaacatctttgggaaatttcagaagtgaaggaaggcataaaatagtcatctaaaaaaagcaggaaagggaaaagacagagaaatccagtatgagtcccaggactccaggaagcatcaggacccacttgaaattgccaatgctgaatttaaaatgaggccagtctgtacagaagcacttctggaatttgctaacagctaaatagagtagaatcaatactttagagaatacgagtaaccaaaggaataaaattaactgatcaacttttgtggtttttactattaatattttcttcagtgtaaatcatagctgcctgaattcctgaacccctcttatataaatctaaaaagctctggtttatcatggttgaaaattcatggctaacttatcaggcaaactgtccctaaagcattttttgaatagctttagtatcaagatggtactgagtgtacatttcatttccctgcttaaaggaaggcttagttattttaaaccaagtcttatttttatagctatcatttgtatatagaaacacaatttttaaacaactaccagcagcataacttgaacaaatatataacagaagaggagggaaccacaatttgggaaccacatagtgagacagggtctcactatgttgctcaggctggactcaaactcctaggctcaaaggatccctcagcatcgcaagtagctgggattacaggtacatgacactgcccttggctctgctctatttttattatttcctttcttctgctacttctgcaaagtagtagtagaaatagtagtagtcatagtagtagtagtggtcgttgttttcatctttggttctttctgactgttgccatttctgattggttgtgcccgtcctcctccagacagtattcagttctcatctgtttttctagggctgcttcctcagatcattctccttattaaagagcccaatgtattggttcacttttaattcctaacaaaagcttgggtttaaaactcaattagaaagggggaaaaatacgaccaatttacaaaagtgtccatggttgtaattatcttaatgtgctacccttttctttgcattatgcctcaatttttaaaaagtccttcattccttcattttccatttcctatcattaatggtgaaggttcaggcattcatgatttccaggaaagtgatttggagagaagaaaattaggagatttgtctaaaatatttatatttaaggcaagcccagatcttactatgatagctttaaaatataatagctatgtctttaaaatcttcaaatatctttaaaatataatagcataagtttctgaataaaatagttgttttaggctgaaagaaagcaagaatgcttcccagatcctagaaacatggcataaagctcagataattatgcactactactttctattcaaaagctttgtaggcatctatttgaaccttcttggaacactattgtcagaggcgtatgaaccagagcaactccatcttgaataggggatgggtaaaatgaggcggagacctactgagctacattcccaggaggttaaggcagtcgaagtcacagaatgagagaggaggtaggcacaagatacaggtcatacagaccttgctgataaaacaagttgcagtaaagaagccagccaaaacccaccaaaaccaagatggtgataagagtgacctctggtcgtccttgctgctacactcccactggcaccctgacagtttacaaatgccaaggcaatgccaggaagttaccctatattgtctaaaaaggggaggcatgaataatccaccccttgtttagcatgtaatcaagaaataaccataaaagtgggcaaccagcaaccctaggggctgctctgtctatggagtaaccattcttttattcttctatttccttgataaatttgcttttactttgcggactcaaccctgaattctttcttgcgcgagatccaagaaccctctcttggggtctggatggagtcccctttcatgtaacactatgaatccagttatggccagcctggtaaaactccgcaccatcctaccagcaaaaatatttagaaaatttataacaaatatttgtatttaattttaaatatttacaaaacattcaaacttgaaaataatctgtattttacttcaaaataaatgtgcaaatttgtaaaacagtaaaattcatgactgctgccctggctgtgatgaagtaactgccacagtaaacaatgagaaaactggacaaaacaaaggagaaactgttttaggatatcaggcaacaggaagcagaggattgtgacccaaagagaagggaaacaaatgaggtaagcgctcatttagttgttctttgatttatttaattcttctctgattctttcatcagaattctgtagatttcatcatataaatctcatacatacagatggttcttgacacgcaatggcatttcaccccgataaatctgttgtaagtacaaagtatcttaagtagaagatgcatttaatacctcgataaacccattgtaaagtcaaaaaaatcatgaagttgaacctttgtaagtcagggacagttattatagacgtatacctaagtagttaattttgggggtactaatgtaaatagtattgtgtttttggtttaaaattccacttattcattgctggtataaatgaaagcagttgatttttatttattaaccttgcatcctgtaaacttgctataatcacttatcagttccaagagtttgtcgattcttttggattctctatatagacaatcacatcatctgcaaacaaagagagttctatttcttcctttccaatctgtatacctcttatttccttttcttgtgtattgcattaactaagatttctttgatgttaaaaaggagtggtgagaggggaatcacaatcaatgccctgtttctgatcttagagagaaagcttctactttctcaccatgaagttcaatgttagctgtaggttttttgtagatgttctttatcaagttgaggaagttcacctctattcctagtttgctgagattttttttcatgagtggctgctgaattttatcaaatgatttttctgcatctattaatatgatcatatgatcacacagatgcgattgattacattcgctgattttcaaatgttgagacagccctgcataactgggatacattccacttggctctggtatataattctttttgtacattgttagatcagtttgctaatattttgttaaagattttttcatttatgttaatggaatataatggttaatagattttttttcttataatgcttctgtctggttttggtatcagggtaatgctgacctcacaggatgagttaggaattatttcctctgtttttatcttttgaaagagattgtagaggattggtataatttcttccttaaaagtttggcagaatttaccattgaatccatgtaggcctggtgtattctgttttggaaaaggagggtcattaattattgattcgattgccttaatatatatatccattcagattatctttttctgcctgtgcgagttttggcagattgtgtttttggcagattgtgtctaggttatcaaatctataagcatataattgatcatagtatttatttataatccttacaatactcgtgggctctttagtgatacctcatttttcattacttttattagatatttatattctttttctttttttcttagtttgcatggctaaaacctatcaaatctattgatcttttcaaagaaccagcttttggtttcattgattttctctattgatttcctgttttcaagttcattgatttctgctctaattcttttaaactttttttaaattatttttatttttatttttaaagacagggtctcactatgttgctcaggctggattcaaactcctaggcacaaggaatccctcagcatcccaagtagctaggattacaggtacatgacactgcctttggctctgccctatttttattatttcctttcttctgctactttggatttaatttgctcttctttttcttgtttcccaaatgaaagcttaggctattgattttagatatttcttcttgtctcataaatgcattctatgttataaatttctctttaatcactgctttctccctatcacataaattttggtaagttctggtttcatttagtccaaaatatttttaaatttatattgagatttcttctttgacccgtgtgatttttaaagtgtgttatataatcccaaagtatttggggatttccacctatctttctgttgatttctagtttagttccattgtggtctgagatcagatattgtatgatttctactcttttaaatttgttaagatacgttttatggcccagaatgtagtctatctaggggaatggtccatgtgaggttgcaaagaatgtgtatgccgctgctgttggatgaagtagtccaagatatccattatttccagttgattgatggtgttgttgaattcaactatgtccttactgatttttctgcctgctggatctgtccatttatgatagtgggtattaaagtctacaactataatagtagattcatctatttctccttgaagttctatcagtttttgcctcacatagtttttgtttgttcgtttttggtttttttgcctcacgtattttgatgttctgttaggtacatatacacctgttaaggattgatatgtcttcctggataattaaaccctttatcattatgtaatggctaccatatccctgataattttttgtcctaaagtccactgtatctgaatttaatataactactaattctttcttctgcttagtgttagtatggtatatattttttttgatccatttactttaaacctatatatgtcttatatttaaagcaggtttcttggagacaatatatagttgggtcttattttttgatccactctgacaatctctgccttttaattggtatgtttaggccattgacatccaaagtgattacttgatatagttagatcatagctaccatatttgctactactttctattcattgtcctggttcagttttcctatttttgtcttacactgtttttcctgcattttgtgggttttaattgagcatattccattttctctccatgcttcttttttaaaacatattttttactggttgccctagagtttataatatatatttataaataatccaattccactttcaaataacactatatcatctcatggatagtgggagtaccttatatgaatgaaataatcctaatttactccttgttattttttgtattactgctgtcattcatttcacatatatgtaagcttatgtaagtatatatgtctgtataaatatatatgaatattgttgctgttaatattttgaataaactgctgttaggtcaattatgaagaaaaataaaagttttaattttatcttcacttattcattctctgatgctctatgtagatcaaagtttcttacctatatcattttcattttatctaaaaacttctttttaacatttcttgtgaggcaggtctactggcaacaaactcccccaatttttgtttgtctgagaaagtatttctcctccatttttgaagaataatttttcgaggtacagaattctagattcgtagaggtgttttctctcaacacttgagattgttcacttctctctcttcacgcttgcatgatttcttagaaaactgatgtaattctcacctctcctttttatacgtaaggtgtttttcttttccctctggcagatttcaatactttttaaacattttttattttctgcattttgaatatggtatgcctaggtgtgtagcatgttttttctttcatttatgctgattggtgttttctgagcttacagatctgtggtttggtgtctgacattaatttggggaaattttcagtctttatttcattaaatatttcttctgttcctttctctctttcttccccttcctttattcccatatgtgtacattacaccttttgtagatgtctcaactacaaaagatattttattgttttttttcagtctttttttttctctttgttttacaactttggaagtttctactgagatatcctcaagctcagatattctttcttcagctgtgtccagtctactgatgagtctatcacagtcttcatttctgttagggtttttgatctctagcatttctttttcattctttcttagaatttccatctctctgcttacactgcccatctcttcttgcatgccatctactttatccattaaaacccttagcacattaatcgtagctgttttaaattcctggtctgataattttaagatctctgtcatatatgagtctggttctgatgcttgctctgtctcttcaagctgtgttttttgccttttttgtatgccttgtaatttttttttccttatagctggacatgatgtattgggtatatggaactgcagtgaaaaaggctttaatcatgtggtggtaacgtgttagggaagaggaagtattctacagtcctataactaggtcagtcttttagtaagcctgtgcctctgggctgtaaatgtcactgtgcttctcagtttctccccctcctagctcaaccaggatggttcaagaatggagggatctggacttgtgtattttccatcccccatatagaaggctagagttggctgtaggtggttatctcccttcccccagattggttaggctctgaaaaatccccaataatttaggtgcttgtaaaaccatttttcttggtattttgttgctgttggatacaaagttatatatagcccattttgtctaaagcacaattcaatgtcagtatttcccttttaattttctgtctcattatcggtctgttgttgatgggggatattgaagtccccactattactgtattgctatctatttctcccttcatgtccattaatatttgctttatatatttaggtgctctaatgtctaatgtctaatgtgctctaatgtctaatatatatttacacttgttatatcctcttgatgaatgtcctctttatcattagtgactttttttgtctcttatgaaagtttttgacttgatgtctattttaaatctaaatatggccacttctgttctctttttttttttaccatttgtgtgcaatagcttcttccatcccttcactttcagcctatgtatatccttaaggctaatgtgggtctctcataggaagcatataattggatcttgattttttattcattaaactactctgtgtctttggattggaaaatttaatccatttgtaattattgacgtttaaggacttactactgctatgctgtttattgtctcctggttgttttgtatatcctttgttccttttttcctttcttatttgccttcatgatttggtgatcttctatagtgttaggtgtttattcttttttctttatttttttgtgtatctgctatagtgttttgctttgtggttaccacaaggcttacgtaaaatgtcttatagttatataataattgactattttacactgataacaacttaattttttccacatacaaaaactctaaacatttatcctccaccctgcttgatctagtctgctgttgaagctctctattgcatttttaaatttcattcattgaattcttcaggtccaagatttctgttcggttcttcgttatgatacctatctctgttgaatttctcattcagatcataaactgattgatatcatcaaattgtctctctatattctcttgtaatttttttgagtttccttttcttattttgaattgctttacaaacaattcatacattttcttttctttggggtcagttactaaagaattattgtgttctttggtggtgtcatatttccttccttttttaggtgcttgtaaaacagtttttcttggtaggctctgttaagtgcaacaaagtgctctggtgtatttcacaatggtcacttttctccttcccctgccagaagcacaaatgatttttttctacaatattcatgacgagaacctggtcaagctcctgggggcaaaactcacaaaagcccaacactgctatggctgcttgcaagccatgttagacccaataccaagagagtttccctcagctaagactctccattgtggggaacatttaaacagaaggaccccaagagcctgtgctactgtgaactctcacaatatgttgctgccactgattccctaaactcttatagcctatggcactgaggtacccacagtcatctgtgatactgatcacagctgaagaagctgcatggaggcttgaccactgcatctatccagaagcagggccagcacacccttttcaaccagcacattaaggtctatctgcagatgaaaatattttcctatgaaagtaactctgtaaagtttggaagtggtgactgtttcatcagatgtgaagacaccaattcagaaacacaagaaacatgaaaaaggaaggaaatatgacaccaccaaagaacacaataattctttagtaactgaccccaaagaaaagaaaatgtatgaattgtttgtaaagcaattcaaaataagaaaaggaaactcaaaaaaattacaagagaatatagagagacaatttgatgatatcaatcagtttatgatctgaatgagaaattcaacagagataggtatcataacgaagaaccgaacagaaatcttggacctgaagaattcaatgaatgaaatttaaaaatgcaatagagagcttcaacagcagactagatcaagcagggtggaggataaatgtttagagtttttgtatgtggaaaaaattaagttgttatcagtgtaaaatagtcaattattatataactataagacattttacgtaagccttgtggtaaccacaaagcaaaacactatagcagatacacaaaaaaataaagaaaaaagaataaacacctaacactatagaagatcaccaaatcatgaaggcaaatcagaaaggaaaaaaggaacaaaggatatacaaaacaaccaggagacaataaacagcatagcagtagtaagtccttaaatgtcaataattacaaatggattaaattttccaatccaaagacacagagtagttcaatgaacaaaaaatcaagatccaattatatgcttcctatgagagacccacattagccttaaggatatacataggctgaaagtgaagggatggaagaagctattgcacgcaaatggtaaaaaaaaaaaaagagagaacagaagtggctatatttagatataaaatagacatcaagtcaaaaactttcataagagacaaaaaagtcactaatgataaagagggcattcatcaagaggatataacaagtgtaaatatatattagacattagagcacactagacattagccattagagcacctaaatatataaagcaaatattaatggacatgaagggagaaacagatagcaatacagtaatagtggggacttcaatatcccccatcaacaacagaccgataatgagacagaaaattaaaagggaaatactgacattgaattgtgctttagacaaaatgggctatatataactttctatccaacagcaacaaaatacacattctcctttagtgcacatggaacattctccagtacagactacatggtgggccataaaacaagtcttaaatttaagaagatcaaaatcatgtcaagtattatttctggccacaatggtataaaattagaaatcaataacagaattaactttggaaaattcacaaatatgtggaaattaaacaactggctctaaataatcaatggatcaaagaagaaatcaaaagaaaaactgaaaacgatcttgagacaaatgataatgaaaacacaacataccaaaacctatgggatgcccaaaagcataaatgtcccataagaggaaagtttatagcaacaaatgtctacatttaaaaagaagatcccaaatagcctaacattaagcctcacagaattagaaaatgaacaaattaaacccaaagttagcagaaggaaggaaattaataaatatcagaaaagaaatagagaatagaaaaaccacaggaaaaaaacaataaaactaagagttggtttttgaaaaaatgaacaaaattgataaactcttagttataccagcttaaaaaaagaaagagaagattcaaatatataaactcagatatgaaagtggagacattacaaaagatgttctcagaaacaaaatagatcataaggaactattattaacaattatatgtcaacatagttgatcatctagggtaaacagattaattcctaggaaaatataactgaagaaggttgaataagaaagaaatagcttgaacaggccaacaacaaatgaagagattgaagtagtaatttaaaatctccccaagaaagaaaagcccaaaaccagatgtcttcatggctgaattctaccaaactttcaaaaaagaattaataccaacacttcttaaatacttccaaaataaaaaagagctggataatacagctgacccttgaacgacatggaggttagtggtgctgaccaccccccaaatgcagtcaaaaatctgcatgtaacatttgactaccccaaaacttaactactaatagccaactgttgactggaagccttactgataacatgaacaatcaattaacacatattttatatattacatttatcctacactttatttttacagtaaagtaagctagggaaaacaaaatgttataaaaataataaagaagagaaaatatatttaatattcattaagtgggaagtggatcatcctaaaggtcttcatccgtgacatcttgatgttgagtaggctgagaagaaggaaaaggagttggtcttgctgtctcaggggtggcagaggcagaagaaaatctgcagataagtagacccatgcagttcaaacctgtgtcgttcaagggtcaacactacttcctaacacattttatgaggcagcattaccttgatacctaagccagaaaaagcaacataggaaaactataggccaacctctctgaagaacattgatgcaaaactcttcaataaaatattatcaaaccaaattcaacaacacatcaatacatcgtgattaagtgggttttacccctgacatgcaaggctggtttaatatacacaaatcaatcagtgtgatatatcacattaacaaaccacatgatcatatcagttgacaaaaaagcattcaatacagctcgatgtctgatttgataaaaacttttaacagtttagatacagaaggaaagttcttcaacataataaagcctatttgagtaaaacccacagctaacatcataatcaatggggagaaactgaaagctttttctctaagatctggtataaggtaaggatgccaactcttagcacttctacttagcagagtactggaggtgctatcaagaaccattagacagtaagaagaaataacaggtattcaagctggataaaaaagaagtaaaattatgtctatttgcagatgacatgattgtgtatgtgaaaaatcccaaagattgcacacaaaaacctattagatctaataaattaactccataaagttgcaagatataaaatcaatatataaaaatctgacatttctatacacaacaatgtagccaaaaaggaaactgagaaaacaacctcatttacaatcacatcaaaaaaataaaataggaataaatttaaccaaggagagacctgtacactgaaaactataaaacattaataaaagaaattgaagaggacacaaagaaataagatattccatgctcttggattggcagaattaatattttttaaatgtccatactactcccaaaggaatatatagatgcaatgcaaaccctatcaaaatttcaatgacagtcttcacagaaatagaaaaaaaaacctaaaattcataaggacccacaaaagaccccaaatagccaatgcaattctgagaaaaataaagttggaggcatcacaaatcctgatttaaaattgtattacaaagctgtggcaaccaaaattgtatggtactgatatagaaacagatgcctagactaatagaacagtatagagagcccagaaataaatccaaacatatatggccaactaattttcagcaagggcaacaagaaaacacagtgaggaaaagatagtttcttcgataaatagtgctgggaaaactgtatttctacatgtaaaagaataaaattggacccttatcttacgccatacataaaaatcaactgtctctccaaatttgggagcagcagttttccctgtgagtttacttctctgataaatataaaaaatgctgatcagtttttttcctgctttttacttgttgttaggatgaatggcaacttccaagcaccttacatgccagggcagaaactggaaattaagctaaaaataacattttaaatatccaaatggttcccagagagacaaggagtaagtttactgaataatctcagttatctctgagatagtatcacatcatctaacatatgtgtagttgtatcccagaaagagaaagaggtttggaaaaatatttgcagatggaatggctgaaaattttccaaaatgaaaaaaaaaacctctaagaccacaagtccaaaagatcatcaaacaaacaaacaaacaaaagatgagataaatacagagaaaaccatatcaaggcataacataataaaattgcaaagaaaagaaataaatataaaatcttataagaagccagagaaaacagatacattaaaaagacaggaatcaatgaagatttctcatctgaaaagtcagagaacaatacaatgaatctttaaagtgctgaaattaaaaaaaaaatctgttaatctagaaatgcatatccagtgaaactatccttccaaactgaaagtgaaaagcacacatattcaaagaaaaattggagagaatttgtcaccagtagatgtgcactacaaaaaaggttgaaataagtcgttcaggcagatggacctgatactaaatggaaacctggatgaaaccaagggaacaaatagtactggacataaaaaaagtgtgtaaatataaattactttttattctcacgttaaaatttctttaaaagacaattgaatatttaaagcaataataacaaattgcgaggtttataatacttgcagaaacatagaatatgaatgtggaaatggaagtatactgttaagaaacttacattttatatgatctggtacaacagtaggtgaagacagactgtaattaagatgtatataataaaacctagatcaacaactataaaaaccaacagtgaagaggtatagctaataagctaatagtagaaataaaataaaatgttaagaaataattaattcagccactgcactccagcctgggcaacagagcaagactccgtcttaaaaaaaaaaaaaaaagaaataattcaataaaaggtaggaaaagaggagaaagaaacaaatataaaagaaatagcaaaatggtatattaaaacctaacaatatcaataactatgttaaatataagtagcctaaaaattccaactaatcggcaaagcttatcactgtgtttttaaaaaaaagtttaactacatggtgctttcacgataaatgcttaaaaatcttttaaaaaaggttaagattaaaaggatgacaaaagatgtaccatgcaaacagtaatcataagaaaagtggagtcaacatatgaatatcaaacaaagtggattccagaacaaagaagctgctctgtatctctgtagagatacagaggggcatttcacaatgataaaaattgaattcatgaaaatgatctaacaatcctaaatatgtatgtacctaattttaagggcttcaaaatacatgaaacaaaacctgacagaaatgaaaggataaataggcaaattcacaaatgacaactgaagataattcaaaactcctttcacaggaagtgataggacaagtagaccgtattagtgaggatatagataattcaaaaactgctatcaacctacttgaccattaatcaagatagaccatattctgggccataaaataaatttcagtaaattaaaaaggattgatctcatacagactaaatgctctgaccataaagaaattaaattagaaatccataacagaaatttatcttaatttttgtaaagtaaaagatagacatatactaatattagagtcaaagaaagaatcatggctaggcatggtagctcatgtctataatcccagtgctttgggaggccaaggcaggagaattgcttgaggccagaagttcaagatgagcctgggcaacatagtgagaccccatgtctaagaaaaaaaataatttaaaaattagccaggtgtggtggtacatgtctgtattcctagctacttgggagttgggaggtgggagggttgcttgagcccaggagtttgagtttatagtgagctgtgatagtggcactgctctccagcctgggcaacacagcaagaccctgtccctgaaaaaaaaattgcaaaggaaattagaaaatatttggaaatgaatgaaaatggaagcatatacttatacaatgcagctaaatcagtacttagaggaaatttttagcttctgaattcttttattagcaaagaagggagttgaaaaataagtggtataagctttcaattgaagcaacctgaaaaagaatagcaaattaaagaccaagtaagcaaaagaaagaaaataaatataagagttgaaatcaatgaattagaaaagaggaaaacaatggagaaaaattaatgaaaccaaaagctggttctttaagaacaataaaattgataaatttctagatgtatagatctgaaaaagaagacacaaattaccaatatcagaaatagagacaggggacattactatcagattctgtagacattaatagggtaataagaaaatatgaacatcatatttacaaatgtttgataatttaaacaaaatggataaatctcttaagtgttagaaattactcaaagtgactcaagaattagaaaactcaaagacccctctatttattacacacacacacacacacacacacacacacacacacacacacagacagccccttctgaaaccctgatatacccctctgcactgtgttagttttgcaaacatttactttgaggaccttctccgggttaggcactgtatgtttacagaagtaaaagatttaatgcagttggggagggaagagacagatgagtgaataaataaaatactgcataataagtgtcatgaaagagatctgcacagggtgttattaaggaaaaaatatgagataccctacatgagagaagacttccataaggaggtgaatattaaagggtaatgatgataatgatgatgatgatgacaatgacaatgatagcaacaacaacaaaataactgtttacttttctcttgatctattgacacatattggctaaatgtgttacacatatgaatgaatctaaacctctcaaaaactctgcagtaggcactattatcctcactgaaaccgagagacccagcagataaagaacttgtctacggctatgcagccagggatgaaaacgaatcaagtgactgaaagagaagaaagtttcagatgacaggagtgacgtgcaaaggtacagacgcttgaggaagcatggtaggtagatttgaggctgcaagcttctttccttccttcacaggcacatttcttgaaaggtaatatctaccccctgccttcattttcgtttccttattagttcaagaaatatttactgagctccttggtgactacccagtctttccttgatgacctgaaatttgaccctgtcccttctattcaacttgccaacaacctttttactgctgtaataagaggccatttttttataatactcattttcttctgattataaaagtaaattcagattgtggtgatggtatacaattctgtaaatctgttaaaaatcattgaactggacacaaaacaagaatgtctccaaatgtaaattatacttcaataaagatgggtttttttaagtaaataaatgctcattgtagaaaaaccaagaaatagaaagaaatacatatggtgactatctcctgtaatctatcaccgcatgtagctagtgatttttcggtgcaatgtttttgcacattacctggatatttctgaagtcttaaacctgatattttcttctactcagccctgcccagcttgtcattctaccttccctgcctcgtgggaaagtatagaaaaagcaaaggaggttgggcacagtagctcacgactgtaatcccagtgctttgggaggacgaggcaggtggatcacctgaggtcaggagttcaagaccagcctagctaacatggcaaaaccctgtctctactaaaaaaatacaaaaattagccaggtgtggtggcacacgcctgtaatcccagctacttgggagcctgaggcaggagaatcacttgaatccgggaggtggaagttgctgtgagctgagattgcaccactgcactccagcctgggtgacaaagtgaggctccatctcaaaaaaaaaaaaaaagtccatttttggatttaaacgataaccagggctgactggatccagggcggggaataagaatactacttgaaagtcggttttatctccctgcttccctcacccccagactagaaaagagggatggggcataatcgggaatgaaggagaaaatgtttacctgcggttttgttcccgagaaaagaccctatttcttaccctgccttctccattaagcctgggagatggggaaacaatagaagccccatataggtcaggggtcctctgagagcagaaggagctggtgttcacagacaggtcaggagaggtgagaggctgtggggccacactgtagagcagagagacacaagcagggatgagcttggcagcgtgtgttcaagctggccaacaagactgcaggacccgtttcctgtgggctccccactgccccctgaccacacacaggaagaatacaacatttcctgggtgtctgagagcagcacggatgtagccaaaataatgtccaaccaaagattagtggggataatcgatgtctccgtgggtgctgggtgcgtaggtgacatccaggatcggaggccctaccccatggcatgatagagccactggggcttacatgccatcctggaaccaggggagtgactgaggcctgaggtgatgaaaggcaagtagcaagtttctgctgcacagccaaatggtgattcaaaacagaaatggattccagtgaagcaggcacctctgactttatggcctgagatccagacccttcacagcatatcagcaggaagggttcagcgaggctttggtggtatttggctcagatcctggtttgctgctctgcttcctcttcacgaaggagacatgcaggaaaggagtagtagcagcggagacacaaaaagctgctttattacaggctgcttctgtgctcaatacccttgatgtggcgagtgggcgggaacatgaggctcagtttctgagccccatgaggtcaagactccctcctcccaagcttgaaaatcagcatttgaccatcttttggtcaacataggggagaggaacctgaagccgtagcaagctcacttaggcctaaagagagagcgagccaactgggcctgcctggaaagactccagccctgtcataccctcacagctgggacacggagtcagaggaagctagggccatgcaagtgtgacaccagggaccctgctcaccctcaagcatggcagagacaatgtcctcaccagatcagtgctgcctctgcacgcaggggaagggggttgaggaagtagagacggcaggaaagcacaagcatttttatcacggttttccccactttgcattatatcataaacattttctcatgtaattaaaattatttcaaaacctaatttttaaaattttattttaaattttatttttttttgagatggagtctcgctatgtcatccaggctggagtgcagcgggtgcgatcttggctcactgcaacctctgcctcccaggttcaatctattctcctgtctcagcctcccgagtagttgggattacaggcatgtgccaccacacccggctaatttttgtatttttagtagagatggcatttcaccatgttgactaggcttgtttctaacccctgacctcaagtgattcacccgcctcagcctcccaaagtgctgggattacaggcatgagccattgcgcccagcaaaacctaattcttaaaagcttattatttcatcatgtgagttgagacttttaaaatgttcccataaattcaggaaaaaactgattcttccgtagccacagtaacatgtagccatcagaactggttttaaatccgttcaattaatcagtgacgactggctttggtgaacacactttcgtaatcaaccaagaggtgtcagcccctgacttcgaaaagccagctaatcagagatgaactcgctgcagcaaacatacctctgaggccaaccaatcggcaacagtctcacacaagtcgctggacttctacttcacaatgtcaagccgtggcttcgaaaggacctcccacctccatctctatgccaccccaaaccctgtacaagatctaccatctgctctattcaaagggactgtgcctgaccggcatagctgcccgcccccatcccctttttttttgagacggagtctcgctctgtcgcccaggctggagtgcagtggtgcaatctcggcttgctgcaagctccgcctcccgagttcacaccattctcctgcctcagcctcccgagtatctgggactacaggtgcctgccaccacgctcagctaattttttgtatttttagtagagatggatgttagcccggatggtctcgatctcctgacctcgtgatctgcccgccttggcctcccaaagttctgggattacaggcgtgagccaccgtgcccggccagctgcccctttttatagttagtatgtgatcacctttctctttttatttgagatactgacaggagatagcatgacttattgaaccattcttctattgctggatatttagattatttccaatacttaatcataaataaaactgtggtatttatctgcacataaaaatgtttcattgcaccactgattatatttttaagataaatcccagaaagtgaaatgactaagtcaatggatagaaatggttttagagatttttataaatattgtcacagtgctttccagagagactgtatcaatttacactcatatatatcattgtctggggtgcccattctgctatatgtttgtaagaattaagtatttcaattaatacaatctttgccaatgtaataagaatagtttcttattttaatttgtatttatttctgagaatgaatatgctagttgtttccataacacctattctcccttcttccataagaataaaatttttggttgggcatctgctgtccagaataaagactacattttccagcctcctttgcagctggacgtggtcatgtgaccgcatttaggtggcatgtaaatggaggcactgtgtggcagcttctggaaacttccttttgaggcgccatgtaggtgaacttggattcttctctgtccacttcccactcctcattctgatgcctaggctttaatgcaagcttggaccacaaagttgaggactgcaccacagggatggcatagggtaagccagactgtgacctgaatgtgagagaaataaactctcttgtttaagccactatttagatttggagttttctgtgactcactggtgattctaatcataatgaatacacccctggtttattggccatatttcctgaccttctgttctgatttgccacctgctgacttgccgcttccatctaagctgtccccctgagaacataacaatttcacatctcaacagttctaagtactttgagggtaggagctgtgctatagtcatttatcatcccactacccacaccctacacaccaaggccagtgatcaataagcaggtgcttatcgtagtactcaatatgtgtctagtggttgaagttctcctccccttcatgaatattcttaatctggagctatagctaggctttaagagtccatagaccactccctaaagttttattcaaaccttttattttagtttattatattttattcatatataaattttttacatatatcctatatttttttctggaagagaatctaaatatttcagcatatattttcaaaggactaaatgactcaaagaagtttgaatggcactgtacctatgacacactggaaccaccattctgccccaccaataggcttaaaaccattactttttcttcagttcattggtccatcacatttccactgccttacccaattcagttatttctcagtctcacgttgacagtattctcctgacctgtctccctacctcaatcattagcccatctctaatgtgccctggacctctatggtgactgtcctgccgaaggatcagtcctgcttaccaagtccacagtccccaccctggtactcaaggtccttcgtgataaggagcccatgtctctttcaaacaccacctttatcctgttggagatcaacttctcaaagacaggaatcttttgtctgttctgttcactgatatatcccaagaccaacacacaacacaaccaataactgctgaatgaatggaggaatgaatgaatgttttctaatatggattaatggggcttttccagatcacttttttgctttgcagtctctgtccctctgccataatcctaccaatataccatgactagttcatatgctaacattgttttctttgcttatttcccttagaagtgatttactttttgccctttagtatttagagtcctggtaacatgcatggctgttctatagtcttttgaaaatgtgtcttctttctgaataggttattaacacagctcgtggctttggcatcattgttcagcccttagtagttgcttgaaaaatactgtttaatgaattaattaaaaaaagaaggctgtatgggctgaattggtgagatttttatagcttttagataaaaagatggctatttctttatctccacttagcatattaaaggtaaggcagagggagaggtggaagtgaaaaagtttctaagtatagaaaaatatgatttactatactttttattttttgttatttcttctaagtggagataaaagagaatttggggtaaaatgaaaattggacataaatttacccaaaaaaaggcatctttcagggtgcagtgacttgcacttttaatcccagctacttgggaggttgaggcaggaggatcatttgagcccaggaggtggagcctatagtgagctatgattgcaccactatacttcaccctgggtgacagagcaagaccttatctctttaaaaaaaaaggcatttttttgtcttggtaaacaatttgttttatatgccataaatagtttaaggcatttaaaaataattcaaatatttaaagaaagttgatgataaaaaataaccttttaaagacataatttaatatcaattcaaagaaaaaactctcacattgcagttataacttccccaaacattgtactaaacaataaaatcttactaacttagttgaaaacacaaaagctaataattgttcctagcaagttactattaagtagtaggcagactgtcatttacaacacttctgattatcacatttctaatttgaaagccccttcttgaaaagagtaatcgagacaggagagtggtaggaagtgagcaaacatttgtgtactatctactaagtgtcaggtatgaataagattgttcttattcttgatgttgtatcctaagacttttgaatcttatcttaagtcaaggacaagttctcagtttgatgtcatcatcacaggaaagggtactttaattcaagaattcttgtcctttttcatcattacatataaatcccaactcaagaaaatggcaaactagtttaaatagcaaaacatctgcaaatgtcactgatccatatttagtgactcctcagtttcaattcgtttctagaaaattgactgaatcatgttagatggttgctttacccagaaacagaagctaataattaggaactacaagtgctcaggtttttgtcactgcctattcattttataagaatcccataggaaagccacatactttattaaagaaggaataaacaagaccgtttttgagaagtgttgtagtgtatgcttatcaatacccctatttactaatacttaacaaaagctctttttcctatactggacctactgagttttccattaaactcagtactgagtttctcattaaatactggacctactgagtttctcattaaatactgatgaatccattctaagaagaaatgcccatatattcctgaatttggtcctatttctgaatatgtctattggtactggatacattccctgtccacacagagttagtaactgtggtcagttttgtggacttttataatatttatttaatggcagttaacctaaggaatagcatgggacagttgattttcttctctcactataattcaggactaattttctcaccattgcaacatatatttacatggctaacacccataaatgatcacataagatttacatgcatttccccaccctgctcactgaataagaaagcaaactgtgaaacaagcttatggaaatagttaaagaattaagatctaatcatatttcaaagctcaccctcagagaagctctctgaagcaaaggccgcagaaactgaaactcatttattacttgggctgaaatacaaactttaagagaatgagggagaaaaaaacctttactttgctctagggaagaagcaactattctctgatgtgcagaaaataatttatcctcaaagaccaaatgtaaatggggtcaattaattttttttaaaatctctaccttctgtaatatttttctaagtctttgacactgttacactttatactaaaatctaatgtgtgatttgacaaatgtcaaaggaaactgactactgtatttaacaaattttaataagcataatgtatactttaaatatacttaacacaaaatttacatgagtggccattctgtggtatagtactcttaggaagcagatagaacacctatgtcaaattttgacttcaaagatttaaaaaatagtgacattgttcaatgatcaaatgacatgaatcagccaagtaataaattatttgaattataagctttgaatctaggcattagatgccccaatttggcatgctcataatgtcttattttttgtttttaaaattttttactttttggttcaattgggtaagaaaaaaagtaatgtatattaattggaaagtttataaaatatatttgcactaagctatgctatgtcagatttgtagacagttcaatataaaacagtggtctcaatacttaacaaaagctctatttcctatactggattattttgagtttagaatagctgctgaaaggacgttcttgagatttaagcattagctgtttctaatttaaaatgacctagactcaaggatacaaaatcaatgtacaaaaatcagtagcatttctatacaccaataacatccaagttgagagccaaatcaggaatgcaatctcatctacgatagctacatactcacaaaaataggaggggaaagatctctgcgaggagaattacaaacattgctaaaataaatcatagatgaaacaaacaaatggaaaaacattctatgatcatggattggaagaatcaatatcattaacatggccatactgccaaggcattttacaatctacagattcaatgctattcctatcaatctaccaatgtcatttttcacagaattggaaaaaaaactgttataaaattcatatggaacaaaaaaaaaagcccaaataaccaaaccaatcctaagcaaaaagaacaatgctggagggatcacattacctggcttcaaactatactataaggctgtagtaaccaaaacagcatggtactggtacaaaaacagacacatcgattcatggaatggaatagagaacacagaaataaagatgcacatctgcagccatctaatcttcaacaaagtcaaccaaaataagcaatggggaaagaactccgtattcaaaaaatggtgctgggatatagatagtgggctagccatatgcagaagaatgaaaatggatcccttttaccatatacaaaaattaactcaagatagattaaagacttaaatgtaagacctccatctataagaatcctagaagaaaactcaggaaacaccattctggaccttggccttgggaaataatttatgaataagtcttcaaaagcaattgcaacagaaacaaaaattgacaagtggaacctaattaaactaaagatcttctgcacagcaaaataactaccaacagagtaaacagacacactacagaataggagaaaatattagcaaactatgcatctgacaaaggtccatccagaatctataaggaatttaaacaactcaaacaaaaaacaacctcataaaaaatgggcaaaagacatgaccagacatttctcaaaagaagacatacaagtggccaacaaacatatgaaaaaaaatgccccatattactaatcagagaaatccacatcaaaaccacaatgagataccatctcacaccagtcagaatggctattactaaaaagtcaaaaaacatgttggtgaggctgcagagaaaagagaatgcttatacactgttggtgggaatggaaagtaattcagacactgtggaaagcagtttggagatttctcaaagaactaaaaatggaactaccatttgacccagcaatcccattactgggtatacaaccaaaagaaagtaattcattctaccaaaaagacacatgtacatgagtgctcactgcagcactattcacaatagcaaaaccatggaatcaacctaggtgcccatcaatggtgtattgcataaagaaaatgtggtacatatataccatggaatactatgcagccacaaaaagggcgaaatcatgtcctttgcagcaacatggatacagctggaggccattagcccaagcaaataccacatgttctcacttataagtgggagctaaacattgggtactcatggacataaagatggcaacaatagacactggggactactagaggtgggagggagaagagggtaggggtgggaaaactaactgttcagtactatgctcagtaactgggtgacaggatcatttgtaccatagacttcagcatcacgcaatatacccaggtaacaaacctgtacctgtacccactgaatctaaaataaaagttgaaaaaaaaataaaaataaaattgaaaaagaaatataagactatgcaaacttttaagacaacatacattatctgcactaaaagtttactacttttcaagaaaatatttaaaaaaaaagaataattcacatttaaaaaatgggtaaagaacttgaataggcatttctcaaaacaagatacacagaaggctaaaagcacctgaaagttatttaacatcattagtcattaaataaatgcaaatcaaacacattgaggtactgctacatacccagtagaatggcaatagtaataataataatgatgatgatgagaataacaagtgttgatgagaatgtgtcaaaatttgaactctcctagattgttgacaaaaatgtaaaatgtttcagctgttgtagaaaacagtttggaagtttttcaaaaagttaggcatagaattcttatgtgacccagcaattaccacccaggtaaatactccaaagaactgaaaacaggtactcaaacaaatacttgtacacaatttatcataacacttctattcacaatagctaaaaggtggaaacaattcaaatgtacatcaaccaataaatggataagaaaattgttgtataaaaataaataaaataaaatgacttagagtgtatctagttttccagaatcatctacatcaaggctgaattacttcgccacttcattttaatataatattcaaaatgtttgaaagcaataagtatgatgcccatacaaaacatgtcttatttccccgttcagttgacaaaaataaggtgtccagttggctctgttgctttatagttgaatttcccatcacccagaccctaaaatctacttccaccatctttttcattacataaagttcctttgatcgactatttcaactgttgccaggtggtaagcagtaaagcatgtggttaacagcatgggctatgaagttaaaccaacctgggtggtgtgaccatgggcaaatcatttaactttcctgggtattattttataacatgtagataaagtggacaataaagattaaataggactgaggtttagcaatgtaggagtgatgcaagtgcaagatggcaatggatcagagagtagtgagtcagcactggaatgaagacaaacactaggttctttatgcgtgagaaaatgggaaaaataaaatgcaaggcaagagcgatcaaaaggagaatttggtagactgaaatcctggaggtgaactaggcgagtaatgttaggtctaaggcatggctgcatttttgcatggtctaaagtggaaacaagatataacagaagtgactttactacagctgagcttataaacttgcagggtcagactgttagaaaagacacctaccaaaacagtcttttacagtagattctggttactctttcttattcatctttccactttaaacccaaaagaactatttgcctcagcttctttactggggaagcaattttcttcctggcatgtccccaagactggggtgctctgctactttttctttttgtttgagacggaacctcactctgtcgcccaggctggagtgcagtggtgtgatcttggctggctgcaacctctgcctcccgggttcacgccattctcctgccttagcctcctgagtagctgggactatgggcgcatgccaccatgcctggcaaatttttgtatttttagtagagacggggtttcaccatattgaccaggctggtcttgaactcctgacctcatgatccgcctgcctcggcctcctaaagtgctgggattgcagagtgagccaccatacccagccagattttctatttttaataacagctgtagtaagatataattcacatatcataaagttcataatttaaaactgcaccattcagtggtttttagtatattcatagatctgtacatttatcaccacgacaaaattctagaatattttcatcacctcaaaaaaacaaaaaacaacaaaaaaagaacccatccctattaacagtcacttcccattctcccatcctttgagccactggcaaccactaatctattttctgtctctagggatttttccactctgggcatttcacgtaatttaaatcatacaacatatgacctttcatgaccagattctttcacttagcatgtttccaatgttcatctatgttgtggaatgtatcagtacttcattccttttcctagtcaaatccattgtgtggatataccacattttgtttatccactcctcagtcaaacatttgagttttttccactttttgactactatgaataatgcttctgtaaacattcttgtacaagtttctttgggaaatattttttcagttctcctgtgtgtacttaggagttgaattgctgagtcatgtggtaactatgtttagctttttgaggaactgccaaactattttccaaaatgactgcaccattttacaatctcaccagcaaagtatgaaggttctaatttctccacatccttgccaaaactttcgtctgtcttgttgattacatccagtctaatgggtatgaagtggtatctcattgttgttctgatacatgatttgtgattatttccttctatctgtgggttgttcttttactttcttggaagtttcctttaaagcttttcattttgatgaagttcagtttatctattttttcctttgtcatttgtgcttttagtgtcatatctaagaattctttgcctaatcctgaaatgtcatgaaaatttacttgcatgttttcttctaagagtttcatagcatttttctctgatattgcttttttctaaaagttttatagttttaccatttatttttaggtctgtgattcactttgaggtccttttatgtgtatcttgtgaggtagaggttgagctttactcttttgcatatggatatctagttgtcccagcactatttgttgaatttccatataaatttcaggatcagtgtgtcaatttatactaaaaaaggcagttgggatttcggtaggattgtgctgaatctgtatatcaatttgggtaatactggcatcttaacaacgttaagttttctgatctgtaaatatgaatgccttttcatttatttagattttaattttttcattgatgttttgtagttttcaagatacatattttgcacttcttttgttaaattctattcctaagtatttaattatttcatgctattttaaatgaatttgttttcttaatttcattatcagattgtttactcctagggtattggaatacaattgatttttctatattgatcttatatcctgcaaccttggtaaactcttatttttcaaacaggttttttttttggtaggattcctgagaatttttctgtacacaagattttgtcattggaggatagaattttacttcttcctttccgatcgggatgacttttcttttcttgccagacttcctaatttctgtcagtctattagatataacatttcattagtgtcttatttttcatttccttggttactgacgatatgagcagttcttcatgtatttatgggctactgatatttacacctctgtaaaatgctgttttgtctttagccaattcttttttttttttttttttttgctgttgttgttgaggcagggtctcactctgtcacctgggctggaatgctgtggtgcaatcacagctcactgcagatttgatctcctgggctcaagctatcctgctgcctcagcctcctgagtggctaggaccacaggcatgcaccaccacacccgacgacctttttatttttactagagataaggtctcactatgttgcccaggctggtctcaaacttttaggctcaagtgatccgcctgccttcgtctccctaagtgctgggattataagcaaagctgctacacctggccttagccaattcttttactaaactcttcatttctgacacatgccaaatttctatggcgtgtgtcagaaatgaagagcttaacaaaagaatattatgccaagtttccataactacatctatatcatctatatatatcaatatatggctttatgtgctctctattctgtttctttggtcagtctatctatacttgtaccagtgccaaactactaacgtccatacctttgcaacaaattttgattttgtatgtggtaggagggaaatacttttgactttttctttttcagaataattttggctgctcttgggccttaggccaggcacagtggctcacacctgtaatctcagcactttgggaagccgaggtgggaggactgcgtgaagccaggagttcaaggtcagcctggacaacaaagcaagacccccatctctacaaaaaattttaaaaattcagctgggcatggtggtgtgcaactgtagtcccagctacttgggaggctaaggtgggaagatcacttaagcccaggagttcaaggctgcagtgagctataatcgcaccagtgcactccaatgtgggtgacagtgagatcctgtctttaaaaattagatttatttttgtcagataaatccaaggaattgcattaaatctataggtcaaattgaggacaattgacatctttaagatacttaaggtattcaagatttagtgggtatatttctccatgatttaggtcttctttaatttcttttaaaacagttaaaagttctccaaataggacttatacggctattcttagattcattcctatacactttctattttgctgtgttagcagaatcattttttaaattatgttttctgtttcttgctggattatatatttagacaactgctaaactgtcttattatttccaatagtttactgatccacttaggttttatgtatagattttatgtacagacaatcatatcatcagtgaataatatcaggttgcttccctctttctaatttgtatcctatttctttttcttgtatagctgtgaccaatggcatctgtatttcactgttgaacagcagcagtgattaacgggcacccttctcctttcctgattttaaagggaatccttctaacatttcaccctaaaaatgatgtttgctctaagtttttgattaatattctttatcagggtaaggatactccctcctattcctagcttattaagattatcacagatatgagttgaattttgccaaatgcttttctttacctgagatgatcacatggtttttctcctttcagtgtggcaacgtgatggattatattaatggatttctaacatgaaatcacccttgcattcttgcattcagtccagcttggttgaaatgtataaacatttttatgtactgctagattctgtttctaaattttggttaggaattttacacttaaaattaaatgtaagattggtatgtaatttgctttttactgttcctggctgactttcatatcaagactacactggctttagaataaatgggggatattacttctttttttcctgtcacagattttgtttattattggagttttctgttccttgaatgtttggtaagaacttgaccaaaatcatttgagtctgatgttttctttaataaaatatttaaaactaaatgctatatttatttaatttctacaggactattagagttttctattctttcatttaatcacgttttctaaaaatgtttccatcttatccagattttcaattttattggcataaagttattcattaaattatcttttctatgttttttgactcaatcagcagtcatttttcctatttcctcctttccctatttgtgtcttctccctatttttctgaccggtcttctaaaaagtttatattttactagtcttttcaaaggatcaaactttgcgtttgccgaattactgatttttaattaaaacctctaactcctatggcatctatgtccttatttcctcctggttctccagggacctctctgacaattgcttatcgatctatagctggttttaaataattgccccattccatctgccctttccttaccatagcaacctctccctttttaatccattccgatagtaaatcatctttttgttgatatgacttccaaattcatccctagccactacagccttggtacccagatccagacacctctctgtgatgtcccaaaggcactcaactaactgaactcgatcatttcttcttgagtctgttccttctcatcttagttagtggcacttacatttagacacccaaataagaaacttagtagaattttttagaatccctctctctcgctcttgacagtcctgccaacttttacttctagattttcacctttctctcctgaatttttctagtagccttctaacttattgtcctattcactctagatatttcatttttgctgtctgatatagatccacccaccatctttcaactgatactctatctaaagtataaatatgatcatatcactttgtaattaaagaagcaattttcattgcttcttagcaaatactaaagttcaagttccttaatggggcatacagtaccattcagggccaggactttacctctccagcttcatgtttctctacttcccactctaccttttatgcctctgtgaacaccagactttagttccctgaatatgctatttcacaccctgtgtttttgtcccattttttttttcatgaatatcattcatttccttggtaggatcttaatcatcttgcaataatcatttgaacatcaggaagtcttccacaaaacctcaagaaatctcagtttgggccaagtcacatttctctatcggcctatacacaattattttattgcttattatattaaaattatctatacaactagactgacaactctttaaggggagggggaatatgttgtacatgttaactccaagcatctagcatataataggatgcaaatttagcttccttgagagaactggatcatagcccacccttctactccaagtctatatcctaactgttgcctgacaggctcagtgtgcctcacaggaagggagtagcagctgaaactgaccaaaggaacagaggaaaacaaaatgggtagccttgcctcttccctgcctgtagaagaagctggcagcttaaatcctgggcaagagtagattagacagtttgctactgaaagtgcttaatttgagaatgcagtatgggacttggaaggcagagcttctagacaggggtagttcttgacatttgtgtcctaaaggaaagagagccatttttggctttataagaagaatcagaagcaaagactataagggatcaaggtttccaataaaccaagctagggatcagggcctgattcaaatcccagcacggatctatgatgggaactgagaccaaggacccaggtagaagcctggggaataaggaaaaaggtgagcagtaactagggaagatgcagatcatgactacaagggctcctcaggggtcagttcagtcgaggcccagcaggtgctgaatgtgcaagctgcatttctatactcttgaagcagcagtcctcaaaaaccaccagcttgggcccagctggcttcagtgactgggcccagtctaagtgctctaaatcattctctcttcagtcttaacctctccagtcctcagctccttcgatcctcgcatggaaatagccttaattaggacctatattttctaaacacagggctcaggccattttctgaaagctctgcttgcttttggcttttcacagtgatgctctaacatagtggctcccacccaggggccttagatttaggaggcatctcaacattatcagaggacctgaggaaaagcctgttagaagagcttggggcttgtaaatagaatctctgtgatcttctgctaagttcttcaaactgttcagtctcttctaactaggccttggcagaatcactgctaaaccttccatcttagtctaacacccttgcgttggggatgtacctgacatacaggcaccaactggcattttatttcctttcagaccaaaatcagcactgcaggctaccctatctatatcccaattacactttattttgatcccatttggaatgggggggaggcttaatcttcatatgattttgggggggatttgattaagtctaatgtcagactgatttattacagcattagtgtaaatcttttagatttcacgagaggaaaaatatcaataaaaggatgacagtaggggatgaaaaataaaacaagaaaccaaaaccttgagaaataattttgtaaagcttaaatgtctgttaatgggctatagcatttaaaaatatttctccaaacaggattagaatgaagaaagaaagtaggaaagatgatgccagagtaacaggagaaaaacgcttttgagctttttctactgaatcagccaccaggatcttgtggcccaggaatctgatttaaaagctccctggttgcttctgataatcagctttaggtgaagaaccactgttctagctaatgaggacaaaacagagggcacttccctaagtaaaagtataaggacagtaattgatacaaaacacatgatttctgctaaccacttctgccatattatctagtttctatgaaaactttttctctgaaaagaacccaaccagttgagattatctattctaaataaatgaatatcatcaactttgataacccctaaagagtttctatagtaacacagaacaaagataataaccatcaagatctaggtaatcaagactgcttagtgtgcttaaactggcttactttaatggttttaaatgcagtaaaaaccaaagagctcagctctaaggaatcagacagcatcgctacaagaatatttaattatgtggttccccctaaaaaaacccaaataaaatacaatgaaatatattgtttaatcacaaaagcaattaaaatacataaagacaattttcactgagtccgcaactctcagcatgtaattatttatctaattcaagtcatgcagctaggtgttggaattaacttctctgaactagatacaaaaatggaaagtcattttgggatttgatcctcattcattttcaaccaaatatccaaattcatttccaattcacacaagaactgccgcagctttacctaaatcagttttctacaagttaaacagcgctcctacactcagatgtgattgtggaactactttgatctttattcccaaacttattgctccatgtaatccatgacaaaatataatgtgatttactatatctctatatgacagcacagcagctgacagaacttaataatttagcataagaaaaaaaccttctggcaccaaaatacacagatcgtaatggggactctttagtatcagtttacaatgaagcctatacaagctgatcctaagaacttcaaaacaattcttttttttcatcatgcatttaatgaaggagatttttattccttaaacatgctttgtagctgcaagcaagtaattcgggaacattttgtttttgttctcattaaaacaatgcagaacaagttacataccgatgtctctttctcaaagaaaagtactaaatttctccattttcaagtaagtgaagaaatacatcatacaggaagctaaaaactctttaaaaaaaaaagtaaatttacgttgtgttatgttacataaaaagcagagattagataattaggtactgtatagagaaccatcagaattaggtgaaatcaagacctgtctctgaagctgctagagctgaattttctctgacctgcacatgtacccctgaacttagatgtttgaaaaaaggaatagaagctatataccaaaagagggtactgttaagtcagaacatatggctggcactgatatgttttagtagtgggtatttaaaaaaaatatttcatggaggaaattgcctataccaaagattatataacttccttagtaatctagaaggtactgttaattcatttttagtaatcaagaaaatacacgattgaacacctctttttagctggacgcctagtgggcactgaggatgtagccatgtccaaatcgaagctcctgtctacagaaagcttaccctgcactggtggggggcgagggagggggcacacacaataaacatatagaccaataacggagtaacagagggatgcatgaaatatgaaataataacccagagtaagagagtggagggtgaagatagctcatttctttttagcactgaataatattccattgtttgggtagtacagtttatttacccattcatttattcagaaaaccaaataccgcatgttctcacttataagtgggagctgaatgatgagaacacatggacccatgagggagaacaacacacaatggggcctgttggaaggtggggagtgggagaagggagagcatcaggaagaacagctaatggatgctgggcttaatacccaggtgatgggatgatctgtgcagcaaactaccatggcacatgtttacctatgtaacaaacctacacatcctgcgcatgtacccctgaacttaaaagttggaaaaaataaacaaaaaataaaaactaaaaatgtcttcctctaattcctacaagaactcacactttatctcacatattctctctctctctgcccttgaggcaacaggtggcaaacttacctaaatctgctttgctaatactttgaacatagacacattttcctttatttctcagccttacttagtccatcatttatgaaaactggatctaaaattgagataaatctgtaccctctaggtttgttaatatattcttctgctccaataattgttctacagaaaaatagcatttgtgtattcctggaaaagttcttctggaaaggataatctttgttgtacaataatcctaacttcattacctttctcttattccttcagtttgacctatatcttatttctctgtgagtgcccccattctactctccatagctacgaagcagtgattatggaaaagaactattcctgatgaaacaaaaagaatgatagttttcttgaataattcagatattctctttccactgaaacttctgtctattcaacatttatggaatgcctgctatattctaggtagtcttccaggcactggggatacagcagtgaacaaaacgggcaaaatttctgttgtcatagaagttacactccgatggggagtaataaaaagctgtattggcatgtatagtcttctgttgtagggtaaactcacttaaggccatattcttaataatcattttcatctttgtacgcatccccatgacaaaatatttcgcaaaccatagaaaaaggataaatattcattaaaagaatagacaaatgatctgtttcatagcttcaatctttctccttccactggctcatttcctttgccaaatctgaagacagaataagctacttctcaagctgctttctccttctttcctttccttccctctataatgcatttaaaggttagtctgtgcctacaatttctactctctaatttctccacatcccaccactttactgaaattggtttactgagggtcaccaattacctacaggaaactccccctggcgaaactctcaacttctctaatttcagaaaaatatttcccattgcctactagaaagctccaaatgggtatcctgatggcattaaacatgtgaactccatcattttctccttcgaatgtacctttcctctatgctccctctgtaggttgatggacggcatgacaaccttggacaccctcctcaagtctccctttcctttccacccacacccagtcaggaatcgcacctgcggcttctaccgtctccccttccaccaccactgccttagtccaaaacctgtgtcacttcccaagacaactgcaatagtctttcaaccagtgttccctttcaacaataacagtggtcacttagaatgtgagatccacaagggtggggactgtgatctgttttgttcattgatatattccaagtacatggaacagtatctgacacaaggcaggtattcaacaaacgtgttgaaagaacgaataaactaagtgctaggcatataaagccctttaatatatactctctcatttgatcaacacaaaacctatgaggctgggattgtcatccttattttatagatggcaacactgtcacttggtaagctgtcctagtcacagagctcataatagtgggaggtaggatttgaagccaggtcagccagtctcactctgaaacaccagctcatgatcacactactaactgtctaaaccactgagattcttaaaaattggttattatgattaaaggggtagctactatttaatgaattcttactaggtgccaaggctttgcataattacttcaccaattacaattctacaggagaggtattaccccattttacaattatgtaacctgaggctcagtgagtttaagcaacttgtcaaagaacagtaagctataaagcaggaattcagactccaaaattctagactacccctggtttcttacaagtactatactagaattatttctctaaaactcaccattttggctgggcacagtggctcatgcctgtaattccagcagttcaggaggctgaggcaggaggatcacttgaggtcaggagttcaagaccagcctggccaacatggcaaaacctcttccctaccaaaagtacaaaaattagctgggcatggtggtgcgcacctgtaatcccagctactcaggaggctgaggcataagaatcgcttgaacccaggaggcagaggttgcagtgagctgagatcacgccactgcactccagcctaggcgacagagtgaggctctgtctcgaaataaataaataaataaataataaaaaataaaacttaccattttattccactaaaaaatcttcaatggtgcctaatccacaaaaaataaggcccaaccccctgagtaaggcatttaacactgttcacacttcggtaattagctctcatttacccatttcaggtagagtttgccctggccacacggggtctgccctttgaatgttttctgggcctctatattcttcctcgagtgctcccaacagttagaaagcctttgccacttgttccagcccatcctagaagaaccagttaaagttacatctctcccaagctttctcagattccaccactgagaatgatgaattctgctttccccttgattacatgagccctgtgtacctctaatgatggcttctgtaacagtttgtctgtagcagttatgtagatatgtttgtcttcctttattagactacgattcctcagaacacaggaaccttctctgaaacccttataagattagcacagttctttgtgcaaaatcaaccactgcagcctgccgaatgaactgagagaatggcctggggctcatctgttgcaggtaggataatacatcaactctgtatatgagggtatttttcttttgtactcattgatcattactttaaaaattagcaaacaatacttaagcaatataaacatttaaatttcttctacgtagaaatcagatactaaactctattttttaaaaaacctcactgaagcgggaagatcccttgagctgaggaattcaaggctgcagtgagctctgattgaccctgactctaaaagcaaaacaaaaacaaaaatgcctcaaacacctcatacagtttgaaaatatcagttaaagtcgaatattgtaaaaatgtatgtgtctttaatattggtgccttggtcattcattatattaataatatcttgggttgggcatggtggctcacgcctgtaatcccagcactttgggaagctgaggtgggtggactgattgagtccaggagttcaagagcagccttggcaatatggtaaaaccccatctctacaaaaaaaaaaaaaaaaaaaaagacaagaaaaaaaattagctgggcttggtggtgcacacctgtagttccagctgcttgggagcctgaggtaggaggaacacctgagcctggggaagtcgaggatggagtaagctgtgattgtgccactgcacaccagcctgagtgatggagtaagactctgtctcaaaaacaacaacaacaacaacaacaacaacaacaaaacccatctttgatagccatcatggtatgtaccatgatattcatttggatattaagactgatgatcagtaccacagatttcatattcttctgttcccattccttggcttccacaagagtgactggttctgctggagcagcataacatctggagtcatacactcaccacccaagcccggacacaacttgttgatattcatctgcaaagggattgttgagatgtccactgattacaatggtagcttctggacatagatgcatcttctagtacccagtaccagcatctaaccctggctcatttgttactgcctgtttgctagcttattcttgagtacttaaacagtttgtttaccatttgggaggataaagatacctgctgatctcttaggctgtcatacctacctcactagcatgtttgtttatcctatctgcaaattcagcttatgattttccttcatcaaaatgtcttgcttttcctgtatgaccttgactccaatgtcatgctgacagacatgagtcatgtttccagtttcaaaatatcacttgattataaaaatgtccagtagcttcataccacacacctgaatagtttagaaaggaagacacggcagttcaaggaaggctcattgactttcttcattgaatctggttaagtttgaagaggattaagtcattttttaagcccagttgaaagctggttcagtgcttatgctagtcacctcttctatccacttgtgaaaatcttcttttgcctgacaatcatatttaatcttgttcttgaccctgataaatcagtggagggacccttcatgtagagtatcattgtggttctagtagtgggggaggctgcacacgcatgcgagggtctctgatgctactggctaaagtggaaactggtgggagatgctggcatcttacttgcatagcgccccctggagatgactgggtggtatatgagtgtgggcctcagtcatatggtctagctgagtttgcagagcttcaaggtcccttctggaatcccactggttttccatcactatggttctcaagaaaatgcccccagccctctacactccttagagctttaggaattgtcagcctatgaccctgatcaatggagagttacctcctgatctcctctccaggtatttagtcataaaaaaaacacattatatatttataacttcaaaaatttgaaacctattatcttctcatatgtatctgagtgaaatattctttatctgaattagtgtatactggggaaaggctagctggctggctggcttctaagaatactcaagcaccttttctgaagtcatcagtaagatccaccatgcatcataatctggttccccatttttgtacaaaaattcaatgttgtgagtacccctgtgtggttattttaaaagactgactcacggactaaagttatagtagacctaggttctagggatatctccctactctcctatgttctactcattattcaatttcatttagatttgcacatcaccttgcttgcattctaaaccagcctgatgacatgcttaatacctgttatttgtcacaagcactgatctccagtactataatcgcagaacagaatttggaaaaatccgagaatttttactgtctcttgtttagaaaggttatagttaattgctttagaatccaaagctactgacatccttgaagtgcttttctgatgaactatgtgaccatggttttcaatccactaaaaaattaagagcaaataaaattctacatgaaaatgcattaggaaccagaatttgttccggagtgctttagtgaatcttaatttttattaatgaccgaaagccttcagaatattaaaatacacaaaaaatgaactaactcatttactagccaaagaggcagaaaccaaatgtttgaatttccttgactggtcaaaggtataatacacatattttaccctaaattagactcaaaagttgttcccttccacttggtttaaaaggtttaagtatatgataatgtagtatttaattctctagtgttacttcccttttattttgaggtgaaattaagagaaaatattttctaggcaaaaaatttcctgaataaggtgtattttctttcccctccaattctgaaacaaatctgtggctaacaagaatatctaccaatagaaacactttcctcttgacagcttaaagaagcttccaatgctgggatacggagctgggaatgtaagctggcaccggatcctctaccttacccacatacatctcattgttggttatatctcatgtctgtctcccactcaattctggggcttcagggtcaacaattcagggttttagtcaaatcaaggggtcacaggccaagaaactggatttcattttggatgcagtgggatggggaagaggtctgtgagcagggaataaaatgaatagaagtccagttgggaagatgaatcctctggcactgtggagaatgatccagaagagcagaggagacaactgtggcaatagtcaaagagcactgctgcccttaggcaagtcctaaagcaactacagttctgaggaggcaaaggcagtgaaaaggggctatctcagccttgtgcctctttctgaaacagaaagccacattgacgcaagtcaaacaactgaacaaaaggaaataactaaacaaaaggtaataatcctttatgcaccatctacctttctacccttctaccattgctcacacacacactggcacccacacactgtcacattcacaaatggatttttctatagttgttttatgtttaaaattttttaagtttgggtatatttctcagagtacatctagaaaaaatgcaagatgatgtattaagagatttatataaactacaggtgagtcatacataattcctcggaaactaagaataagaaacttgtcctctgaacatgaaatcagtttctcacatgttcttctgcttcttgatagactctttttcaatattactaactgccttttcttccatagccatctctttaaaaaactgagatataactcatttaccacaaaacacaccttttaagagtatacattttaatggtttttactgtattcttaaagttgtacaaccatcaccacaatctgattctgattttttttttcactacccaaaaaggaaatcaatagccatcattccccatttccctcgactgaaactctaatccacattctgtttctacggatttgtctattctgaacatttcatataaatgtaataatacaatatgtgtgcttttgtgtccagattttttttatttacatagtattttcaaggtttatctgtgtcatagtatgtatcaggaactcattactttttacagctgagtaatctttcattttatggatataccacattttgtttacctatccatcagtgactgggaatttgggttgcttatactttttggctatttatgaatcatgctgctttgaacatctgtgcacaagttttaatgcaaacctacattttcaattatcttggtatatcccctaggagaggaaatgctggattttataattctaagtttaattttttgagaaaccatcaaactgttttctaaagtggttgggctgttttaaattcccattgtaaaatacgaagattccaatgtgtattcatgtcttttccaacacttcctattgtttgtcttttttaatacagccatcctagggggtgtgaactagtgtttcactgtggttttggttagcatttccataatgactaatggtgttgagcatcagtggtgttgatctgcttactggtcatttgtatacattctttggagaaatgtctattcaactccattgcccatttgtcagttgtattatgtctttttgttgttgacttgcaaaattctttatatagtctattaggtttttatcagctggatgattttctcccattctgtgggttgtcttcattttctttctttctgtcttcttcatcttcttttttttgtcactctgtcacccaggctgtagtgcgctggtgcactcactgcaacctctgcctcctgggcttaagctatcctccaacttcagcttcctgagtggctgggactacaggcacatgccactacatctggataatatttctaatttttgtagagacggggtttcaccatgtttcctaggctggtctgaactcctggacttaagcaatcctcctgccttagcctcccaaactgttgggattacaggcatgagccactgcacccagccatcttcattttcttgatgttgctgtattctttgaagtacaaaagtttttaattttgatgaagtccaatttacctcttttctcttttatcacttctgcttttgttgtgatatttaagaaattattgtcttatccaaggtcataaacattttctggtatgttttacacttttataagttttataattttagttcttacatttaggtctcacaagttgctattgacaaattatctcggtttgtgtttatctgagaatattcttcattttaaaaggacattactggaagtagaattcttggttaacagtgtttttctttaagggcttttagtatttcattccactgctttctgaccttcatggtttccaaagagaaattagctgttaatctttatttctttagacataatattttagttctttgaacatatttcaagtaacttatttaaagtctttgtctattaaatccaacatctgtgcttcctcaggaacagtttctattatttttccccctgcccacgggaaataaagtgtgcccatgccacactttgtttctttgcatgtctcataattattttgcagaaaactggacattttcaatattttagtatggcaactctggaaatcagattctcttccttcccccagggtttgttgttgttgatggggacttttgttgtaatagtggtggtgatactgtttatttagtgacttttctgaacaaatgctgtaaagtctgtgttctttgtcatgtgtggcagctgaagtttctgcttggctagttagtggtcagctaatgattgggtagaggtttctttaaatgcctgcaaacaataagtcttccagttttctcattgcttttatggaaaagagactttgtggaggcttttactctgtcattttccctgacatcctctcagtacacttgttcactgttgtttgctacagggttacattctttccccttttctcttattccacaaaatttctctgggcaatatcatacacatctaggtcttaaaattctaccccaaatttattgacttgcaaaactacatcctcagcataaacattttccctggaagatgtatttgtaaatgatcaatagtcatttctatgtgtatgttttacagatgtctctagctcaacaggtcttaaaccactcacccactcagtcacacaaactagaaaactgggaggcacgctagactactcctttatcttcaattcttcactaaaacacctcctatcaaatcttacaacattccaccaagctcatcattatcttatcacattatacataccccatggaaagcatttatttacatggatgttcttactagactataggcatcttgtgagcaggaattgtatatatttatcatcttattctaggactcatcgtgatgcctaactcattatactcagccaaatgctttatctgtgtagcaggattgtattttccaaagatggccgcatcaatatattcctcttcccacacgctcttttccctatatagtgtcgatgctccatcaaggggtggagtcaaggagctctcatctcttgaatgtgggaagacctttacaagtgccttcaccaaatgaatgtgacagaaatgacaccacttgaaatctaaggctaagtctaaaaggtgatatgaattccacctggctttctgtcccaggacatgagccatggagtactgagctaacatgtgagatatccaggtaccctgaagctgtcatgtagacagactacatagagatagagatgccagaggagctccagctatatgtatcttctctctccaagtaccaggagcgtaagtgaagaagacttcaatatgacctcagttccagttactgtctgactgaaaccacatgagacactcaaggccagaaccattcagttaacgagcctccaaattccagaaacagtaagagataatattgctgtttgaagccactacacattttgtggtgattttgttatacaacattagataactaaaacaataaatgaagaaatgaagattagagtggagatatatcaatatcccctttcatttctctaccatgcatcattttaaagtggaaaatagttttaaatatgtgcttaaaacaaaagtatctcaaatttatatcaaaaagtttcaagatgtaattaatgtggatataaaatgaacatacatctagcaaggaagtcctttctccaaataccttaggtgttacattattttctcaaaatataaatgactgcactatgtaatcaagtatcacatgccatcttaaaaggtaaaacccctgttctttactccctcccaatagataatttcatgaagataatttctggatcatccacgttagaagtttctagtactataatatctaagtgcatcatgttcatgcattgactgctcttaggcaaacttttgctaaattaaatgtcttactgtgtttttgtagtttcctagtcaaaagagcatttttatgaatcatgagcatttctgttgattcttattttttacacagcaaaatttaataaacttaaaaatagtttataatgatggactattcaatatatcctagatgtagacaaatccactgtgtgtgtgtagcacaagtttaacctcaagctaatagctgttaatatcttaggattacatttctttagaacagatccttatttaacatagataaaagaaacaacattaaatgaaacctcatccagaagaattttctaactttcaataacctctcagcatgttttaaaaaacgagttgggattaattacttttaatttttaaaaatgtgtttcgtctggtttccctaagccaaaagacatgttaatttaaataaacacaagagaagctttgtattttgattcacaaatataaaagaaaatttttctgaattattaaaattagatgagccgctcataacactgttttgtattctatgtctataaagctcttttcaaaagaacaaatttcagtcatttatccatttcaaatgtagatgaatacatctaattactcactcaacacgtatgtttgaagccccatatcgacacaaaatttctcctagaagagatattaggagaaatttccttaattgacatttcattttgcttaatacattaatcataatttccattaagtgtgtttctgatgacatcatttaaaaagtatcttctctgagttttaatttctaattccagtctgctgcattctgggcagaataagaaactgaatgaaaaaattactactgctttgtgaattatttaaaatgcattatatagagggtaaatataaaatttattttcaaaactagacaaattttgagaataaaagtaatgttaagaattatactgaaaaataagcattgaaactggaacctgtggtcattctaaatatgaatcatatcctcagtatgatattaacaatattaaatatcaccatgttaggtgagggccacagtccatctagcaaaggacaaactctgtacaattaattttttttttttttgagacggggtctcactgtgtcacccaggctggaatgcagtggtgtctcaacctccacctcctgggttcaagcaatcctcccacctcagcctccagagtagattgcagtacaggtgcacactaccacatgtggctaatttttgtatttttagtagagatgggattttgccatgttgaccaggctggtctcagactcctgagctcaagtgacctggccactttggctcccaaagtgctgaaattacaggcaggagccaccatacctggcctacaagtaatctttatagtggcaggaagagtcataagtgtcctcattaacatcatcattttcatgtgttttatgatattttactatttctatgactaccgtaatacctcacttgcccagagatcagagttccagtggcaatggtgtgtattatttaggagctgcccttagtcccttgctcatgctacttgttgtataaactcagtcaacaaattaaaagcagctgccaaaagcataaagtaacaactgaaagaaaagggaggagacggaagaactataaaaaggagagaaaactgggataacaatgtggggtagattttattgtagggaatcttttatgtggtatcaaaacattctcaatgatgactctgagttgatgtctttagcatttttcgtttaaaagagtagaggagtaagtagagcgtgctagaaaaatatccttcaaaatggtaagctttggcacatatattgagattacattttagttttttggaaactgacttgcggaacattttattcctggacaatatctgataaatgaggtattcctgtacttccttttatttggcttgaaacaatctctttaaaactcttttaagcagtgctttgttgaaaaaataatctgaattaatccatccatggttttagcaaattttgccatagaatctctcaatgttctgcctaaaatcaaaactttaaaaaaatcttcatatggaaacaccttcattctctttatcactttagttttcctgtttcaaatgtttaccagttctgtattattttcagaattttaagctgcattatggatccattcaaataatatttgacacaaaagcagaaaaaaatattttattattttgtcctattctgtttccagagggttataagtatctgtgtcaatactactgtttggtgaaatcaagacccaagaattattcttgacagaatctttccagtctcaattagggtgctatagttggaaaacattagagattcatccatctatctattcaacacacttgtactggtgcctaaaacatgccaggcatgtgcccaggggaaacaagcatgcataaacaagtaaaacaataacaaaaacagtaataataaatcataaggattgagaagtagtgtagagaaaaaaggtagtgtacaataatagaaagtgatgggggatattctaacatttgggtggagagtaggtagtcattggaaaatacaagatccactatggtttgaacgtgtcccacgatattcatgtgttggaaagttaatcctcaatgcaactgtgttaagaagtgggaaccgtaagaggtgattagatcatgagggctctaatatcattaatatggtttggctctgtgtccccacccaaatctcatcacaaattgtaatccccacatactgggggagggccctggtgggaggtgactgaatcatgggggtggaattccccttgctgttcttgtgatagtgagtgagttttcatgagatctgatggtttaaaaatgtgtggcacttcccccttctctctctcctgttccaccatggatgggaagatgtgtcttgcttccccttcaccttctgccatgattgtaagtttcctggggcctcccagtcatgcttcctgttaagcctgcaaaactgtgagtcaattaaacctcttttcttcataaattacccagtctcagttctttgtagcagtgtgaaaatggactaatacagaaaattgatactaggatttgggcactgctataaagatacctgaagatgtggaagtgactttggaactggataacgaacagaggttggaacagtttggagggctcaaaagaagacagaaagatgtgggaacgtttggaacctcatagagatttgttaaatggtttgaccaaaatggtgacagtgatgtgaacaatgaggtccaggctgaagtggtctcagatggagataaagaacttattgggaagtggagtaaaagtcattcttgctatgctttagcaaagagacaggctgcattttgcccctgccctcgagatctctaaaactttaactcaagggaaatgatttagggtatcaggtggaagaaatttctaagcagcaaagcattcaggatgtgattggctgcttctaaaagtgtatgctcatatgcatgaacaaagagatgttctgaaattgtaacttatatttaaatgggaagcaaagcatacaagtttggaaaatttgcagcctgaccatgtggtagaaaagaaaaacccatttttgggggagagatttaagtaggttatagaaatttgcacagaggagccaaatgttaatagccaagacaatggggaaatgtctccagggcatgttaaagacctttgtggcagcccctcccaccataggcctggaggactaggagggaaaaatggttttatgggcccctctgctctgtgcagcctggggacatggcaccctgtatcccagcctctctggctccagttgtagctaaaaggggccaacatacagctcaggccattgcttcagagggtacaagtcccaagccttggtggcttccacatggtgttgggcctgtgtgtgcacagaaggcaaaagtttgggagcctccacctagatttctgaggatgtatggaaatgcctgaatgtccaggcagaagtctgttgcaggggcaaagccctcatggagaacctctagtaaagcagtgcagaggggaaatgtggggttggagcccccatacagagtccccactggggcactgcctagtggagctgtgaaaagagggccaccatcctccagaccccggaatgctagttccactgacaactttcaccttgcatctgaaaaagctgcagccactcaatgccagtccatgaaagcagctgctgaggcagtaccctgcagagccacagtggcagagctgcccaaggctgtgagagcccaccccttgcatcagcatgccatatatatgagacatggattcaaaggagattattttggagctttaagatttaatgactgccctgttgggttttggacttgcgtgggtcctctagcccttttctttttgccaatttctcccttttggaatggcagcatttacccaatgcttgtactcccattgtatcttggaagtaactaacttgtttctgattttacaggctcataggtggaagggacttgtcttagctcagatgagactttggaattgcacttttgaggtaatgctggaatgagttaagactttgggggactgttgggagggcatgattggttttgaaatgtgagaaggacatgagatttgggaggggtcagggatagaatgatatggtttggctctgtgtccccaaccaaatttcatcttgaattgtaatcctcacgtgtcaggggaggggcctggtaggaggtgattgaatcatgggggtggacttcccccttgctgttcttgtgatagtgagttctcatgagatctaatggtttaaaaatgtatagcacttcccccttctctctctctctcatgttccatcatgggaagatgtgccttgtttctgcttagtcttccaccatgattgtaagtttcctgaggccacccagtcatgcttcctgttaagcctgcagaactgtggcctcccagtcacgcttcctgttaagcctgcagaactgtgagtcaattaaacttcttttcttcataaattacccagtctcaggtagttctttatagcagtataaaaatgaaccaatacaatcatgaatagattaatgtcatcattgcagaagtgggtgtgatacaaaattgagtttggccctcctctttttctctctcaccatgtgccttctgccatgttatgacacagcaagaatgcccttaccagatgtagcaccttgatcttggacttcccatcctccagaaccatgagcccaaggaatttctattctttataaattactcagtggtgttctgttatagtagcacataatggactaagataagatctgaggggggaaatccagacaaagagaaaaaataacttcaaaggccttaggtaggaacaagcttgaaatacttacaaaaggcaggaaaaccacatgctggatccatgtaactgagggggagaggagtaggggataagctgaagagatgggcaggggccagatttccattttgtttcaatactgatgagaagccattggagggtttttagcatggaattatataatctcatttattttccaacagatttgattgttgtacaaatgaactgttggaggaagtaggtatgaaaataggaagaccaggtgggagttactgcaacagtccagtgaagagtcaatttagatttattttagacttgggtggtaatgacagacgtgatgggaagtggtttgatgtaagatatatttgaagcagcaggaatttttggtaggaagaatgtaggcgtgaaagaaagaaatgtgtcaagtatgactcagtactagttatgatatgaagaatattggggaagaattaagagctctgtttcagaaatattaagtgccagacatctattagaatttcaaggaaggtgtttaggaaaaggttgaataccagcctggaacttcagaaagagactaggactagagatacaaactggaagtcatcagcatatagatggcatttaaagcaatgagactgcacaagatgagttagggactgagtaaaggaagtgggggggggaagataaggtggtgttactaaaggagatggagtaggagcagctagccaattaggagaaattcctggagaccacgatgttcttcctaactgataatgtgattaaaacctatcagagaaggagtgatcaatggtgtcaaaacttctgagaagtcaactgtgatgaagactaaagacagagcactgcatttagtgcagagatcacttgttgattggacaaatgtttcaacatattgaagtggcgaagagcctcattgccatgaataaaagaagagaatataaggcagtagaataattaagtattaatagaaagaccttttgaagactctggttacaaagataaacaaagacgtggcacagtgattgaagtgagatttggattgcaacagagcatttactggtagttgaatatatacccccctccctattgcatctccccttccccacacacatttcctagccccctgcaggtaggtggagccttttgtctagttctggctaatgggctgtgattggaatatgggtcatttctgggccaaagtacaaagaattgggtgtgagctcttcatatcctgtctcctctagccatcggtgaccagtagtgttcaagataatggaatctttctatcaaccaacattgaacttacaatctgaaaaagtattaatcacattaaattattgataactaaccagtttagatctataaaaacagcactttcttatggtttcacttaacaaatctttgctgagtgaagccactgagatgtgggggtcaatttgctaccacagtataacttagaataatttggcatacgtgatcaaagaattctttaacatattatttcatatttttatatttttgaaataatgtatcagagagaaaaatattgatataagagaaatggtggataattataggagaaaaacccttgaataaggatgaggagtgtagtgtactagtgaagaccttagacagaggtacacatttccataaggaagaaatccatctaccctaaaggagggaaggtggaacatggatatagatgcaattgcagagtagatttgggatgggcagataaagtggttctcttctgtttgcctccacttttccagtgaaatcgaggtcatcatctcagaacagaaatgaaaaggcagtgttggaggtttgagaagaatagacggagatgaaattttctactgggaaaatgaattaacattgcagtgctgagggctctttggccttacgttcaagggaagatagttaacataagtgtcttctcttgaaccatggtcaagtgtttagatactgtagtagagtacatgagtgtttggtgtagccagggttggggattgccaatgaggaaggtagaggtaaataggggcaaggaagctgagagtagttcaaggaagtggttactctgatggaccatgaaatctaagctgagaagtgaaaacatgaagaagttaatggaaagtggaaaatgatgttaatcgattgtaagtcccacagggcaaaaaactgctagtgtgaggacgctaacctaactgagttagaaatgtgggggttggggagggcagagagaatggaatgccagaaaccaaaattttcaaggtggtacagttactggaattgttaaagactctagtcatacccctgaacaggtggctgaggtggagaactgatgagctcaagaaaccgagaggccaatgagttgtaataatctcattcatgggctaatccatccaacatcatattggctatgagcaattatgatttagggtaggacatgctttgttcttcctgtgctagttttatcacatacaagttatagccatgaaagtgaagcgctgtgaatgagatagtgtgaagcaatatctaaatttttacaagtgaagtgttatttaaatgaaaatttcttgaaaaattgcttttcttaattttataaatctcctatttagaaccgaaaactaaagagcctggcttttctgtaataacagaatgcctcatttttggtctacaactctaaattgaagtggtattttactactaaatacctgtaaattattctctttttctttccataattaatacataattttctgtcattgctgctttccaatcctaatcatatgtattaaaatacatttttttttcttttttttgagatggagtctcactccattgcccaggctggagtgcagtggcttgatctcggcttactgcaagctccacctcccgggttcatgccattctcctgcctcagcctcctgagtagctaggactacaggcgcccgccaccacgcctggataattttttgtatttttagtggagacagggtttcaccatgttagccaggatggtcttgatcttctgacctcatgatccacccgcctcggcctcccaaagtgctgggattacaggcgtaagccaccgcacccggcctaaagaattttttattgctgaaaagtatcttactttcccttgatttttcattttctctgggatatttctccaggatatttacatggggaagaaaatggccttttcctccttgtagatgattcagttaagaaaggaatagaattggcttaaacctcattgctccaaaacgaccctaagagctccaagaaaatttttccacattcatcaaaatctgcagtctgaagcagctgacaagggcacctgaagcaatccaacaagtcagcccgtttataattgaaggcttttattgaactatttttggatcctgttatatattatctccacaagaaaacaaccagattaaaatgaaatactacaatggaacaacaaaacttcagttttatttacataaaaggcaaccttctaaaaaagcatccctaatctctcaaagacaatgataaggcaatctggcagcttgaaaagtcaaagtgactttcaagcattgttgtttaaactgacaaaaatttctacagatgccaatgcaaaattaaaaaaaagaagtaacacgtttaaaatatatacactttagagtttatatagaataaaagctttttttgaacttttctaggattgaaaacaaaagcaaacattgctcttccaaagccattatcgagcagaaaaatattcatacagaagtaaaaatctacagtgcaaattaaagcagagagaaacaatctagaataaaacattatttcaaataagataatgtatgcatgagtgagcatttcctctgaatccaggtgactagcagggcatgatgggaagattacacttcttgtcatcctatacagaaacaccaagaaaaggtctggtgtctctccaggggcaaggaccaataattcttcgagaaaaggcatactgagaggattctttaagtcaaatggatctaagatcaagtccaaagtgatcaataagagctgaaagatcagtcaagtaccaaatactcaaggaaactcatcaacgtagaaacaagaaacagggaaggggacttgtgaacaaaaggtgtgggcaatgaggaattaggaacccaatcagagcctcgttgggaaatgaggaatgtggcaacaagcatgaattggttcataaaaccaatgatcttgtgaaacaggagctgcttctatcttttgctcatagtgacctatctgagccaacagatggttggatttgcttggaaatagcatgagaagccaacattcctgacataggtgttggagaaagacacactagaatcttggttctgcaacttgtagctgtgtaactctgagccagttgtgtaattcctctgagcctcagtatcgcctacaattctaaagcattcagtgagttgggagaattaaagtagataaggtgcgtgaaagtgctttacacatggaaagcacacaatcagtatcttcttccattaggccaatacacctgtatattgcttattgtttaatttacaccaattattttcaggaatttatttgagcacaaggaagtgtggaattaagaatctgtgttgtatctgactttaaaaaatacagagaagatcgttcattttttttatgacattgacaatgtcaacgtttaacacaaacaattctattttaaaatcttgtatttcctgatcaatctgttgggagtgaaaattagaagagagggtagtaaacaaagtaagaatttgcaaacatagttgaactcagataataaatacctatatcctctacaggtgcccttttctcataatagaaaagagatgagaagacatgaaaagtgaaagcttaaaaagacagtacccatgtaaggcaagagtagaatctgttcagagaggttacttgtctagggctgcttagctagttattgacaggggctttgctagaactcacatctcttgtggaatgtgtgtctaacatattctcaccaaagaagaagcgtatgcattatttcctcagtgaagccctttcttggtcccaaaaccaagctgtctgctctgtatgctctcatagctttctctatttcccttttcaacacagtcatcaggcatattgttaccatgtggataatggagtgagtggttaaaagcataggttctggtgtcaaactgtttgaatcttgtctctccaaattattcaaacgatttaagcatccaaaaagaataaaagcacttaatttacagagatgtagtgaggagacaataaacctttacaacaatgcttgacacagtgcaataaatgttggccatttgtattattagtaaggataattaaggcaaggagtgtttaatactggatgtccaacacagagtggtgctctccccaaagatagcacaggatgtgtcccctgtcaaaccctcagaggaattgcaaacctataaaattaataaactttgaaagtagttgtgtgattatgtttgctaaataaaggcagttccaattggcacaaatttcagttttcatggtttagtttaaacaaactcagtgccctaccaacatagttaaaatttcagttaccacagtctatcttctgtggtgaagagcctattaaaccattttctgatttttaaaagtatgttttcttcttattgagttctttatatatgctgtataaaaatactttttcaggtatatattttgcaaatattttctccaagactagtttgtctttttattttcttaagagtgtcttctgaagagtaaaagttttatttctgatgatttctaatttatcaattttttcttccatagttcataatttctgagtccaattgaagaaatgtttgtctaaatcaacatcactaaggtgccctatgtttcttccaagggttttatacttgcagcatttatgttgaggtctacaattaatttcaaggtaacttttgtgtaactgtgaggtaaaagttgaggtcttctttatctccatgtgaatacccaattgttcagaactatttgtggaaagactatccttcccccattcattatcttagcacatttttgtcaaaaattgattgattataaatgtgtaggtatatttcaagactctttattttgttccactggttgatatgttaatctttacaccaataccacattctcttgattactatagctttatggttagtcatgaaatcaggaggtgtaatttccccaactccattcttttccaaaattgatttgacaatgctgtaatgaaatttagagccagcttgtcaaattcaacaagaaaactgcttaggtttggatgaggactgcacttgatctaaggatcaatctgggagaaatgacattcttacaaggttgagtcttcctgcccatgaacttggtatttccttccatttaattacatctttactttatgccacaaaagtttagttgtcagcacacagatcttggatatatcctgttaaacaagtatttcatatttgtgatgatgttgtaaatggctgattttaaaaaattcaatttccaacattcattgcaaatacataaaaatataactgattttgcatatggacttggtacaccatgaccttgctaactttagttattggttcttgtagttttgtatttttgcagattccttttatctcatgtagatgacatgtctgcaaatagacagttttacttcttcctttctgatttgtatgccttttatttctttttcttgccttgttgcacttcctacgacctccagtataaagtgaatagaagtggtaacagtagatgtcttttccttgttaccaatcttgggaaaaaataatatggtctgtcatcattaagtatgattttagttgttggtttttctttttctggtgtcttttctttttaaaaaagtttttaaaaaacatttttgctgaaatataaatcacataccataaaaatcacccattaaaatgtccaattcagtagttttggtatactcacaaagttgtacaaccatcactacagtctaagttgttttttaaaaaaattttaattttttattcccataggttattggggaacaggtggtgtttggttacatgaataagttctttagtggtgatctgtgagattctggtgcacccatcacctgagcagtatacactgcacccaatttgtagtcttttatcccccacccccttcccacctttttctcctgagtccccaaagtcttttgtatcattcttatgccatctgttctttattggctctttgaataggtgttaaacttttaatgctttttctacatctactgatataatatgatttttcttttttagtcttaatatagtgaattacattgattttttaaaaattttgaaccaactctgcattcctgagataaaccctacctgaccttgatgtgctatcctttttatatattgatggatttgattggctaatattttgttaagtgattttttgtgtgtgtctgtagtctgtagttctttttctcttgcaatattaatatctagttttgttatcaggataatgataagttcataaggtgacttggaaaatgtttctcttttattttctgaaacagtttgtgttgaaatggcattatttctttcttaaatgtttggtagaattcactggtgaagtcacctggtataaaatgcacttgtttattcattattcctaaactaattccataaaaacattgtggaggcagttgcttataattctttcttccagcaaatgctagcagttacttgcatacagagattgccaaataagtatctgtgaaagcaaaaactaaaatgttacatacctttgtttttttctgcctcacttaaaaatattttgtgtgtgaacaaacaatatgagtgatgatttatataggtatatattatacaaaattaattttaaatgaagtataatattaagggctatttttaaaacccaggtataaggagattgctacttattatttaacaaacatagatattcagcatattgactaatgttcttcatttaatttggtggttaattaaaccatttaggttatgagaacaaaatcaaagtactgtctagttaaaaacgtttcaaaacaggtgctaaaatatgggactgaaacaaccaatagctatttaacggagaaagattacaaaatcatttcctaaataactttcttctttccttcttgcaagatcagatcaaagcaaaaatcagattcccttcatgttcatgcaagttcctgttcctgtgatttttaaaaatctgattcctccaaaaattgtctttcaaaaactgtcctatttatttctagcttcttgaacaataacaattaggtttataaaaattggacaaattttgttttggctctattcattagatctcacagggtacttcaaaaataaaccaattccaacatctggattttttatcaaagtgctgtctaattccttggccatatgaggcatattttaaaaagatggtacagagcagttaaaaatcatgctgaaacaccactctggaaacttttatagtattttattttcagcttataacctagtaaatgcagataacatggaaattctacagagcctgacaaacgtaatttgcttaccccaggtaagctttttacttaatttgagctactatgttggggttattttattcttagctatattttatgtgaaataaactaatttgcatttttttaaaaacctgtgttaaaatatattttcatccattaggtcctgatcaattatgacgccttttcttcttcgtattgtcaacacttaacacgctgcccagtttacactgtcattactcaataaatgctaaacttgaacatgaagtttaactgaactaaactggtcttgtagcaatttacaaagtaacccagaaggtcagatatcaatgtgacttacagtgaaggaagtaattacacatttttctttcacttgaagtggttctaaatatacaaatatatttactttgctttcctcaggtaggcagccctttacctaactaccatgaaaagagtttttaaaaactttttgttaaaataacaaagccctcgttgcagaacaccaaaagccacatattttaagatatcaaaatcttcaatatttttagctctttagaaatagaaaactagcaaaagatagcaccatcagcaaataatatctcagccccttccttactactcccccaccatccttcctcaggattcagttccagtgaatgatcatcagaagcaaaacctgaagcaaaaatctttcaaaaattacaacaaataaggtacattcttggcaagtctcaattttgtgataactttctcctcaagtttattattataaaactatcttgtaataaggttatttggggacccccttagatggtctgagactaaatgatttctacttcagaaaaaaatactctataacagggttttggttatttaacacagcagcattcaaatagcaggaattcaatttttgttcaagtaaatactatctgctcattaatttgtttaatcacaaaatgatttcacaaaacaatacagtttgtgacttcttaaagaacttctggtgttcagattgacttttaatacattatgtctcacactaatagtcactctatttttagaaaagttaaaatcaaaataatacctattacacctccattctaagggaaaaaaatatgtttcatgaggatgttgctgaagatgttaattaaccatattacacttgtcctcttggtgagaatctcttgtaattttttctctaaagatttcaatccactaatttttgaaataatgacttttaaaagtttattgcactgaatcttgttttaattgtgatgctttttataaattgacatttgctactgaaaaatgtggagtcaaatataggtccttcagcagaatttatccaacgcttagagtgtgttgtgttttcatgaacactaccactagcctcaccttattttttcttttattttctgttagctgtgattccttactttaaaagaatcttgcattttaaaagcaaccttgagcttccaatattttctctcctaatgatatgaaacaataaaaataaaaaccaaaaaccccacaccctcagcataacttaaagctagaaaaatgacaaagtaactgtgagtaaaagaacaggtaattatttcaggtaagattcaccaatggttcagacaaaattagtgaacaaaagtctaagaatatgtgcatagtctcaaactatgtctcccaagatattttacctcttagaaatgaaaaatgattaattttacagcacagaaacctggcagataccatctttaaaaagtgatcaatgtttgcatcaccaataacaagatattttgataccatgcatcctttgatataatgcatctgagaaaggcacaatatcacttctgcattattcttgccagaaatgcataacctcaatctaatcataaacaaagtgagaaaattctacaaaataaccagcagctagcacacttcaaaagcgtcaaagtcatgaaagatcaggaaagacaggggaggtgtcatagattgaaggagaataaagagatataacaactaaatgcactgtgagatcctgcattgggtcctagaacaacaagaaggactttaatggaaaagctagtgaaattaaaataagatttgtagttatttaatagattgtgccactgttaatttcctggttttggcaattgtactatagataaataagatgttaacattaggggaagctgggtgaaggacatatggcaattccctgtactatttttgtaacatttcagtaagtgtaaataaaagtttaaaaacaaaaatgttaaaaaggcatcttcaatctttttaaaataagtgggattttcataaacaattaccgtctgacattcttccgatttttcctaagctcatagcttcctcgtgttatcccctttgactgcctcagaaaattcttcatatctagtgccaattcaaatattgtctctcttccataaaagatcccgcttcctacagacctcagatctcccagcattgtaccctaaagtagaagtttaccatgcatgactagatagttttctagttctttttttacctgtatttctcattgtcactgcaataagaaaagctcccagaatgcagtgacaaagttacatgtcttttcatgattttccccagcactgacctaaatatacagtaaatgcttgttaaatacatgttgactcattcactcataaattatttaaggaaactagagatttgtaagttcacatcatccattttacagcctctctgtgaaatcagacatcaaatacaggactgaatgggccattcgctataatctaagtatggcaattctgataatttcttattctcaggaagtctctaaaatgtaaaatgtatgatacttccttcaacttcataaggtagttggggttgaataaacaccagaatccatagaaataacaggcctaaatttatagaaatataggcctaaattataaatctttaaaaggtcattgaaaactgttagaattccgcattcaatattaatatgaaatgtacaataacataagcaattgtcacaaataagattcaaagatactgatgtttgatgagatattttccatgacccggggttgcttccttagagtattcctaggatgtctactgatctgttaaagtcatgcaatgggaacaaatgtccattttctttgccaagaaaataccatagatgaatattaaaaacagttatgtaagccaaaactcacatctgcacacacttaaaatgtagcccttttttaaaataataatttgtaatacattctgaaaaaaaaaaacaaaaaatgttgtacaatgctctacacctggctgggtaaccagtgtttttagccataagtgcagtgatacaggctatgtaattactgaaattgattagtgtactctaaattgtggaaatatgtatgtgtttgtatattagtaactgtttttggcatctatttcaggcttgtttatattatactatgtgtatatatatacatatatgtagaacacaaagttcaaaatatactctactgatgtaaccaaccaattaaaggaaataaaatctgtttaaggggaatataatgcatggaacttaacgggattttctacacaatctggggcttccaatacttaaaaaattatcaaattattaaacttatatatataattatatatatatatataattatatatatatatatatatatatatatttttttttttttttttttttttttttctgagacggagtcttgctctgtcgcccaggctggagcacagtggtgcgatctcggcttaccacaacctctgcttcccaggttcaagcaattctcctccctcagcctcctgagtagctgggattacaggcatgtgccaccacacccggctaatttttgcatttttagtagagatgaggtttcgccatgttggccaggctgttctcgaactcctgacttcaggtgatccacccacttcagcctcccaaagtgctgggattacaggcatgagccaccgtgcctggcctaatattgtttctttaaaaaaacgtttaaaatgtcactaattcactaagaaggtatcacaaacaatgctctaaaaagcttttttaaaaccaatttaaaaaatatgtgtggggaaaaatatattttggtctgatattgaaaaagaaatgatttgcaaaatttttaaaatatttaagtagtcaaaattcccaattcaatggaatatttagcatacatgcatatataatattattttaaaatatttctatatcattttatttttaaaagaatgattactacagggagtaatgtagtatactacatcctactacagtaggatgaagaataatttgtatcttaaaaataggtatttaaaaacatagatcacttttcctatccatgttggtttatattgttgttataaaaaaaaaatcagatgtatggcgtaggacacaacaaagtacagtcttccttaggtacccacaggggattggttccaggactccggtgataccaaaatccaaagatactcagcacctttaaacaaaatggcagagtatttgcatataactatcaacattctctcgtatactgtaaaacatctctagagtatttgaaatacctaacacaatgtaaatgctatgtaagtggttgttatactgtattgtttttacatttgtattactttttattgttatattgttatttttatatttttaaaaacatttttgatccacggttggttgaacccatgagtacagaacctacagacacagaagacagattataaactgaaaaattacaaatgctcatgtattttccctggtacatttgattcttcataggttagatttgttttgaggagtcattttccaaaattcaccagtttattaataacatataccactgtgaaaaataaaatatgttgacatatgtggcataattaaaattaatccttcatagggaaaactattaagaaacaggtattcagctaattatatatgtagaaaaattccaaggaatctaccaaaaatagtgactagaattaataaatgagtttagaaaggtcacactgtataatatcaacattaaaacatctattatatttatatattagcaaagaacaattgggaattgaagataaaatcatgattcaatatcatctaacaaaatatgtgcaacctctagatgctgaaaactataaatgctgatgaaagaaattaaagaaaacctaaataaatggtaagatcttccatggtcatggatcagaaaactcaatttcattaagatttcaaccttaatgtagattaaacacaaatttaaaaatatctcggtaggattttgtgtagaattcattatgctgattctaagaaaaacaaagaaaccatcataggcaaaatgatcttgaaaaagatcagtgttggacaacttatactacctatctctaagactgactataaaagctacagtaatcaagatagtgtggcattgtaaaaggatagacatatagattaatagaagaaaaacagaaagtccactagtaggccacatatatgtggtcaaatgattttcaacaaagctgcaaaggcaattcaatggagaaaggatagtcttttcaacaaacaatacagaaacaattgaatcttaatccatatattgcaccatccacaaaaatctactcaaaatggaccacagaccaaaaagtaaaacctgaaactgtaaaattctagaagaaaacaggagaaaagctttgtgaccttaagtcaggcaaagattttttatacacaacaccaaaaacatcatctataaaagagtaaactggtaagtcagaattcataaaaattaagaatctctgctctttgatttgggagaaagtgtttgcaaatcacatatcttataaacaacttgagtccagaatacataaataactctcaaaatttaataattagaaaatagcagtaaaaaatcagaaaaagatttcaatagatacttcaccaaaaaagatattcagatgacaaaatatacacaggaaaaggtgctcaacattattagtcattagggaaatgcatgaatggtgagaaatgtgtatttggatgactaaaataacattattaactccacaatatgaagggtgcaacctaactggaactctcatacactgctggtgggagtgcaaaattatgtagctactttgggagacagtttggcagtttctaataaaatttaaaaatatacttaacataaagctcaacaatctcatttctttctatttactcaagttaaattaaagtgcatattcacacaaaatctttatgtgaatgcttaccaacccagatatttcccagctggagaatggataagttttgtactcccatacaatggaatactactaagcaataaaaaggaacagattacagtgacacacaacaacatgagtgaatctctaatgcattatgcaaagggaaagaagccagactcaaaaagctaactactgaatatttacatgacattccagaaaaggagaacctatggtcacagaaaatacatgagtgattactaggagctgggacatgagaaaagaagtggagctgatgacaaaggtctggagaaatgtttgaggtgatggaactgttcttcatcttgatgtggtgatggtttgtcaaaacttgcagaactgcacataacctatataagttatagttgttttaaaaagaggaataaatgaagagttagaggaatacaagaaagagcttgactgcttctgagttggtgtggaaaggaggaaggcagggacatctttgaggaagaaagatgagttaccaagtcttccaggcagaggggaaaatgtgtgtgaagccacaaacggagattgtttacagcctatttatggaaaacagagttgtctgggagtgggtacagcacagactgttatctgtggtgggagagacagttaagaaaggtagaagacatcaattcacacccattacaatggttattataaacagtgttggcaatcatgtggagaaactggaacccttgtgcactgccgatgggaatgtaaaatgatgcagatgctatggaaaatatatggcagttccctgaaaaattaaaaacagaattatatcgaccaattcctacttctgagtatataccccaaagaactgaaagcagaaactagaacagatatttacacatccatgttcacaaaaacattattcataatgtgacaaaaggtggaagcaatccaactgtctgtccattggcagatgaatggatgaacaaaatgtggtatacacatgcaatggaatattattcattttgaacaaaacaggaaattctgacacatgctacaatgtggatgaacttgaagacattatggtaagtgaaataagtcagtcataaaagaactactactatataattccattcatatcaggtaccctagagcaatggtcctcagcctttttggtgcaggtttcatggaagacaacatttccacaggatgagggtagaaggatggttttgggatgaaacagttccacctcagatcatcaggaagtagctcacctgccactcacctcctgctgtgcagcctggttcctaacaggccacagacaggtacgggtctgcagcccaggggctggggacccctgccctagagcatcaaatacatacaggaagtaaatgatgcttgccaggggctagagggagagaaaatgggagttactgttcagtgggcacaggtttagttttacaaaataaaaaaaaattctcgagacggatcgtggtgatggttgcacaacaatttaaatgtacttaacaccactgaactgtacagtaaaaaaatagttatcataacttaaaattaattaattaaaataaatacataagaaagaaaaacaatgaaaggtacagaggggaaatgaaattatgcaaatctttggccagacaactaggaagctgtggcaacttcactttttcttgggctacagcactttgtaagcttttgagcaagggagaaaatgccattagctcacaatctacctcttccagaaagttctgccagattctgcctgttgcccccagatgtcagacacctccctgcatttcccagggcatgcagtccagcatatctagatgatggcccttatttctgttcaatgtgattgcagtttgttccatcatccctgccctatcaaaattcatctccttgagatgaattaccaatgcctaactcagctcagcaatgagatttattttttcagcaagatccctatgtcaggaggacagaggttgtcttgttcttaccttcttctctttgaggttagattttcctgtatccctcagaggcttcaaacttcctgcctgctctgtcttggggacattaccattctcttctctcatctctatcagtctcagggcttggttttccttggcagatggatggtctaaactcagagaagcccacatcttcgttgacccccattaagatctcagaagcagtgatgagagccctcagtgcaggctgtagggcaggcagaacttctaacaagaagccagtgagagcacagcctccctcccctgatagaaaggtgacttgggcccagagggttagagtgtctgagattccccaccacaatctcttaggtgggggtgaggtgagatagtgacatcacaaccacactgcctggctcagttcctgatgtcagctaatgtgatgccagggctaaagggccagcacaccttctttgtgattctggtctcccaggggcagaaaataggaagcaggctaaagatgccctaggacttagggacaaggcaacagtatgacgaaaggttgacttctgtgcatcactgttcagcttacaaagtgcataatagagaacatttcgaaatacagaaaaatacaattcaaaattcacatatcccatctcacagagaaatgaactagcatattttttccatgttttcctgtgtgtaactatgatgattaatactgagtgtcaacttgactggaatgaaggatgcaaagtattgtccctgggtgtgtctgtgagggtgttggcaaaggagattaacatttgagtcagtggactgggagaggcagaccaaccctcaatctgggtgggcaccatctaatcagctgcctgcatggacagaataaagcaggcagaagaaggtggaaagagcagacctgctgagtcttctggccttcatctttctgccatgctggatgcttcctgcccttgaacatcagactccaagttcttcagcttttagagtcttggacttaaaccactggcttgccaggggctctcaggtcttcagccacagactgaaggctgcactgttggcttccctacttttgaggttttaggacttggactggcttccctgctcctcagcttgccacaggcccattgtgggacttcaccttgtgagtcaatactccttaataaactccccttcatatatacatctatcctattagttctgtccctctagagaaccctgactaacacacgaagcttatctatggcttactttctggctctcatgacccctatcaaatccatcagaaaatcatatttactcttacttaaagtatattttaaaaatatatccagaatatgatcacctccccagctaccactctggtctaagccaccatcatttcctctcatctggattaccaaagttgccttctcattggtttcccacctttgttctcatgcagctagaatgatcttttaaagcctaagtcagatcatgtcccttcatggcataataccctcttactctctcattactcagagttaaagtcaaagtcattggaacagcctcaaaggccctacatgaccaggccttggaatgcctctaatgtcttttccaactcccccatgtccactatgttctcgtcacactggcttccttaagtcctctagcaatgccagccatgctcttgcattagggtctctgcactagctcttccttctatcagcaatttcttcctccgaatatcaacatgcctcactcgactccttcaaatttgtttgaatgttaccttcttgatgaagccagctttggccacactatataaatggtaccagccctggtactcgagagtctccctgaatcttctctatcatttccttttcaatagcactttgacacttaaaaaaattctatataagttacttatgcagcatgttcatggctaacaatgtatctctcctactagaatgagctctgaggggacaggaatatatgccattttgctcactgctatatcctaagtgcctagggccattgtacaaaaattaagcacaaaatgctgaaagcaatgggtgtgtgccattagtctgttaactgttccccagtacctgttcttcatttcttttcaaaatagtctccctgcaacttttagcacagtgcatgcaaataggtccctgcttccccaggtgtgcccctgggactgttttctccagtaaaatgtcagaatgatatgcacaacttccatggcaattccctaaaaggaaatatttgtcttcctcatctttttcctctcttcctgctggttaagaaatggtgtccatcagaagagcagcctttaaagcagagatggagacagtatgttgaggatgactgaggaatctcactagtcagcctaggttcctaagtgacctcatgaaagagaaccatttgatcctagccctgggccatcctaatacatctggattcttacgcaaaacagaaataaactttcttatttcatttctccactgcattatggggttccctcttacagcaacttaggcttactctaactagtatataaagaatcacaaataatttttcttttttgatttatcagtatagtaatttatattattaataatagtgctcctaatatcaaaccatctttgcactcctggaataaaatccatgtgattatgatgtacaatattttaaatatgctactagattctcctgcttaatatttagttttttacaatattcaaaagtgagattaatatgtttttagagagtttttttttttcagttttgacactgatattatgctaactaaggaatagattactaggtcaaaagatagggatatttttaaggttcacagtatagataaccacaggctttcaggaaggttgtaccaatttatattctcaacaatagcattttagagtgtttatgcactgcaccctaggcatcttggtattattaatttaaaattacgcttggtaatatttaaactaatttactttttcaatatattaaaaaatagtatgtcttaattagcattttctttattacttatgagaatgaagaggtttatttaagccaactgcagttttagtggtcatgtactttctatttatttttttaccatgtctcataatgtattcaatttagttaaattactcaaccactttcaatttttaatttatttaatctgcacaaagctggatcaggcaaaccaggcccatagagaatttttttttccattatgaatatgagttagaaccagacctgactctcaacacagaacccttccactatactagacccataatgtatctatgcagctttatgcccatcagctcattctattgtcctcccctcaaagaaggtctaaacataggaggcgggagtgtgaaataagaggctctgtccctttatcccaacatccctgagtctcttaataaagagaaaataagtttggttctaagtgcataaaatgctattcgaaatgttgatgtggtgtggaataaacatcagaaaggctgcttggaatattaaaataattacagtctagctatctataagctaaatttggtattactgtcaaaaaagcactcatttaaaatatatatagtgactacaatgatattcaataattaaagtacagaaaacaaaaaaagaaaaggtacatcgtttacataaaaagtactcaacttagcatgaaagctgggacatatttaacagtgaaagggatagcaggaaatgctaagtcacacaagatactgggacaacaggtaaaagtgagaatgttttggtcaaattaaaatgtatagacaccctattaatggtaagatatcaaagtagtaccataagtaattatttctgttcttatttgtaatcatttcatcactgataaagatcccagtaaaatatattttttcattttattaactttagtgttataaaaaacagatgcactgtccaattaggctattacaaacttagccatgaagttgaaaggatcaaaagatttatacaggcaaagactgggagtggcatcagcaagatggtggaatagattgtctggcatcactcctgccaaaaaatataactaaaaactatccaaagacaagaataccatcctgagttcaccagaacttggaggaaagcagagaaactccctgggcccccagaatcaagagaagccatgactggtaagagaaatattcatgttggactatgctgccctctcccacaagccatcataatgtccctcacacaaaatttctctagattcagtttccaaggtaagaggttgtagacattagatctcctccacagtctgggaatcttcacaggaagaccattctggtcttgtcccacaggaactaatgggaatgccaggaatactgaaccaaactggggtgaactggggacaaacagccggcactgattacttgaactagtgcatggatcttggcagctactctgtacttcaatcagtgaggaagccatattaaagagactgcttgctgctctattgcagcagtggggcagaatctgtgggaaggctcgaattcctggctagatttttccacaaaccccaactgctctatggagccttgacctgacccagaaacaactaaaaggttaagattaagttctggtgcctgcttaagtcttccttacactaggaaacaatggcaggtcagcaaggtagttcaaaggtaatgtttaacttccaattctcactataagtcttccccagaccagaaaacagtggcaggcagtgattttgtttcagagaagcatttaagttctggagtcaactataaatcttccccagaccagaaaaaattggcagggcaatgagtttgttccactgcaatgttttagttctaatgctcactataagtcttccccagaatgggaagtaacaacaggccagcatttaacttctgatgctaagtagtaaaggtctgataccaccaaagaatacgtgcataaaatagagaaagtggatgtctcctcaaatgtgcagccaccaacataaagatgcaaggattgtgaaaactcaggggaatatgacaccactgaaagaaactaccaatagactcagaagagctgacaaactgtgaaatatcagagaattcagaataatactttcaaagaatttcagaaaatcaggccaggcgcagtggctcatgcctgtaatcccagcactttgggaggccgaggcgggtggatcacgaggtcaggacatcaagaccatcctggctaacacagtgaaaccccgtctctactaaaaatacaaaaaattagctgggcgtggtggtgggcacctgtagtcccagctactcaggaggctgaggcaggagaatggtcagaacccaggaggcggagcttgcagtgagccaagatcgcgccactgcactccagcctgggcgacagagtgagactccttctcaaaaaaaaaaaaaaagaacaaatttcagaaaatcacaagcaaacatggatagaaaactaaaagaaatttggaaaacaatccaggaacaaagtgagaaatttgacaaggaaattgaaataaataaaaaaccaaatagaaatcttagaaaagataatacaataatagaactgaaaaactcttttgaaagtttcaacagcagacttgacaaaacataggaaagaattagtgagcctaaagacagaacatataaaattactcacagaaggaaaaaggaaaaagaaaatgagtgaagaaagcttacaagatttatagggaaaacaacagaatatacattcatctcattgccacatagaacatactctaaaattgaccacataattggacaaaaaacaatcttcagcaaaggcaaaagaaccgaaatcataccaaacacactgttgtaccacagtgtaataaaaatagaaggcaagactaagaatatcattcaaaatcatgtaattacatggaaattaaacaacatgctcctgaatgacttttgggtaaataatgaaattaaggcagaaatcaggaagttctttaaaactaatgaaaacaaagatacaacataccagaatctctgggacatagctaaggcagtgttaagggggaaattatacagagcactaaatatccacatcaaaaagttggaaaaatctcaaattaacaacctaacatcacaactgaaagacttagagaagcaagaacaaatcaacctcaaagctagcagaagagaagaaataaccaaaacgagagctgaaatgaaggaaactgagacacaaaaagccattcaaaagatcagtgaatccaggagtttgttttttggaaaaaaaaaaaaaactaaaaagacagataggccactagctaaactaataaagaagaaagagagaagatccaaataaacacaattagaaatgactatgggaatgttaccactgaccccacagaaataaaaataaccatcagaaactcctatgaacacccctatgcatacaaactagaacacctagaagagatggattaattcctggacacatacatcctgccaaggctgaacaaggaagaaatttatttcatgaacagaccaataacaaactccaaaactgaatcagtaataaatagcctaacaaacaaaaaaactccagggcctgatggattgacagccaaattctaccagatgtacacagaagagctgctaccattcctactgaaactatttcaaaaaattgaggaggagggactcctccccaacgcattctatgaggccagcaccatcctgacaccaaaacctggaacagacaaaacaacaaaaaaagaaaactttaggccaatatacttgatgaacattgttgcaaaaatcctcaacaaaatactggcaaactgaatccagcagcacatcaaaaagctaatccaccacgatcaagtagacgtcatccccagaatgcaaggttggttcaacctacacaaatcaatgaatgcaattcatcacataaacagaactaaagacaaaaaccacatgattatctcagtagatgcaaaaaaaggctttcaataaaattcaacaccccttcatgttaaaaactctcgataaaccaggcattaaaggaccatacctcaaaataataagagccatctataacaaacccaccaccaatattatgctgaatgggtaaaagccagaagcatttcccttgaaaaacaaaacaagacaagaattccctctcaccactcctattcaccactgtattggaagtcctagccagagcaatcaggcaagagacagaaataaaggacatccgaataagaaaagaggaagtcaaactttctctgtttgcagacatgattctatatctagaaaaccccacagttttggccccaaagctccttcagctgataaaaaacttcagcaaaattttaggatgtaaaatcaatgtactaaaatcactagtattcctgtacaccaacaacagccaagccaagagcccaatcagaaagcaatccattcacaatgccacaaaaagaataaaatacataatatacctaggaatacagctaaccacggaggtaaaaagtctctacaatgaaaattacaaaagagtgcttgaagaaatgagagaagacacaaacaaatggaaaaacatcccatgctcatggattggaagaaccaatatcattaaaatggccaaagcaatttataaattcaatgctatacctaccaaactgccaatgatatttttcacacaattagaaaaaactatttcaatattcatatgaaaccaaaacagagcctgaataccccaagcaatccaaagtaaagagaacaaagctggaagaatcaccttactcaacttcaaactatactacagggctatattaaccaaaacagcctggtactggtacaaaaacagacacatagaccaatgaaacagtatagaaagcccagaaataaggctacacatttataaccacctgatctttgacaaagatgacaaaaataagcaacagggaaaagactccctattcaatgaatggtgttggaataactggctagccgtatgcataagactgaagctgaatcccttccttaaaataaaaagaaaaatcaactcaagaataattaaagacttaaatgtaaaacctataactataaaaaccctggaagacaatctaagcattaccatcctggacataggaacaggcaatgatttcatgacaaagacaccaaaagcaatcacaacaaaaacaaaagttgacaagtgggctataatgaaacttaagagcttctgcacagcaaaagaaactatcaacagagtaaacacacaacctacagaatgggaaaaaatattcgcaaactatgcatgtaacaaaggtctaatatccagcatctataaggaacataaataaatttacaagagaaaaactaccccattaaaaagttggaaaggacatggacagacacttcttaaaagaagacacacatgtggcaacaagcatatgaaaaaaagctcaatattgctgatcattagagaaatataaattaaaacaacaatgagataccatctcacaccagtcagaatggctattagtaaaaagtcaaaaaataacagatgctggcaagggtgtggagaaaatggaacacttatacactgtctgtgggagtgtaaattagttcaaccattgtggaaggcagtatggccattcctcaaagagttgaaaacagaactaccattcaacccacaaatcccattaccaggtgtatacccaaaggaatataaatcattctaccctaaagacacatgtacatgaatattcactgcagcactatccacaatagcaaagacatcaatcagctaaatgttcaccaatgacaaactggataaagacaatgtgatacatatataccatggaatactatgcagccataaaagaatgagatcatgtcttttatgggaacatggatggagatggaggctattatccttagaaaactaacacaggaacagaaaaccaaagaccacaggttctcacttgtaagtagtagctaaatgatgttacctatgcaacaaaccttcacatgtacccccaaacccaaaataaaagtaaaaaaaaaaaaaaaaagacttaataggacatcagcaagtgaatgaatctccacataacagaaattcccaagacagaaaaaggcccacaaagcatatttttaaaaaatgactgaaaatttctcaaatcccaagaaaaattataccatccacgcacaggaagaagtaatcaatcaaatttaacccaaaggggaaatccccaaggcacacactaatcaaattagcaaaaatgaaagacaaaaaaagaatactcaaagcagcaagagaaaagacacatatcatattcactggagccccaatacggctttcaatggatttctcaacaaaaaccctgaaggccagaagagagtaggatgctatattccaagtttaggggttgggggtggaaaggagagactgacaactaagaatacatacccaacttcactattcttcaaaaatgaaggaaagataaagattttcccagacaaatcaaagctggggttattcatcaacaccagacctgtcttacacaaaatgctaaagggagtttttcaatcagcaagaaagaaatgaatgctaacatgtaacaagaaaacatctaaagatattaaactgacttggaaaaacaagaaaacagacacattcagaatagtctaatactggaatggaagcacttaaaccactatgtgttcagcatgcagactaaaagacaaactattttaaaataataactacaataattggctaagaggcaatataagaagattcaaattgaagcatcaaagagtcaaaaatgtggtgaaggggatgctgttaaagtgcagtttttttcttatttttcttttggttgtgttcaaagttaagtcactatcagtttaaaataacctcttataactaaaagatgttttttgtaagcctcgtggtggccacaaagcaaagtaaatacactaaaaatagcacagaatcaatagatacactaaaaatagcatagaatcgaaacatactaccaaagaaaatcagttaaccgcaaaggaagacagtaaaaaaggaaggaaggatttacaaaacaatcagaacacaagtaagaaaatggcagcagtaaactctttcctatcaataataactttgaatgcaaatgggttaaattctccaattaaaagacacagaatggctaaatggatttaaaagaaaacaagattcaactgtacgctgtcttcaagaaactcacttcacctataaagacacacacagactgaaagtgaagagatagaaaaggatatctcatgcaaatggaaaccataaaagagcaggaatagttacacttatattagtttatgttgactttaagaactgtaaaaagagagacaaagaatgttatataacaaataaatacagaaagataatataataattgtaaatatacctgcacccaacactatagcacccaaatataaaaaaacaaaaattaacagaccaaaagggagagactgactgcaatgcaataatagtagtagatttcaacattccactttcagaatggacacataatccagacagaaaatcagcaaagaaatattcaaggtaaactgtcctctagaccaaatagacctaacaagacatttgctctccctctccctctccccatccccttccccctccccctccccctctgatgcccagccgaggctggactgtactgccgccatctcggctcactgcaacctccctgcctgattctcctgcctcagcctgcccagtgcctgggattgcaggtgcgcgccgccacgcctgactggttttcgtatttttttggtggagacggggtttcgccgtgttggccgggctggtctccagctcctaaatgcgagtgatctgccagcctcggcctcccaaggtgccgggattgcagacggagtctcgctcactcagtgctcaatgttgcccaggctggagtgcagtggcgtgatctcggctcgctacaacctccacatcccagccgcctgccttggcctcccaaagtgccaagattgcagcctctgcccggccgccaccccgtctaggaagtgaggagcgtctctgcctggccgcccatcgtctgggatgtgaggagcccctctgcccggccgcccagtctggaaagtgaggagcgcctcttcctggccgtcatcccgtctaggaagtgaggagcgtctctgctgggccacccatcgtctgagatgtggggagcgcctctgccccgccgccccatctgaaatgtgaagagcacctctgcccagccgctaccccgtctgggaactgaggagtgtctctgccccgctgccaccccgtctgggaggtgaggagcgtctctgaccagccaccctgtccgagaagtgaggagcccctctgcccggctgccgccccgtctgggaggtgtacccaacagctcattgagaacgggccatgatgacgatggcagttttgtcgaatagaaaagggggaaatgtggggaaaagaaagacagatcagattgttactgtgtctgtgtagaaagaagtagacataggagactccattttgttctgtactaagaaaaattattctgccttgggatgctgttaatctataaccttacccccaaccccgtgctctctgaaacatgtgctgtgtccactaagggttaaatggattaagggtggtgcaagatgtgctttgttaaatagatgcttgaaggcagcatactcgttaagagtcatcaccactccctaatctcaagtacccagggacacaaacactgcggaaggcggcagggccctctgcctaggaaaaccagagacctttgttcacatgtttatctgctgaccttccctccactattgtcctatgaccctgccaaatccccctctccaagaaacacccaagaatgatcaataaatactaaaaaaattaaaaaaaaatacaatgatacaattaaaaaacacaaataaaaaatggattaaaaaaaagacatttacagaattttccacccaactgctgcagacatttacagaacatttcctcaacagcacatggaagagtctccagtatagactacatattaggtcacaaaacaagtcttaagaaatttttaaaaatcaaaatcatatcgtcttttctgatcacaatggaataaaactagcaattaataacagaaggaatgttggaaactgtacaaatccatggatattaaacagcagacccctcaataagaaatggatcaatgaagaaattcaaagagaaatgttaaaatttcttgagacaaatgaaaataaaaatacaacacattaaaacctatgagatacaggaaaatcagttcaaagagggaattttataacaataaatgcctacatcagaaaagcagaaagccatcaaataaacaatctaacactgcacttctaggaaatataaaaggtagaacaaaccaaaccccagatttgtagaataaatgaaattataaagattggagcaaaaataactgaaattgaaaccaaaaaaagaaaaatcagcaaaacaaaaagttgtttttaaaaaagataagcaaaaactggcaaacctttagctagactaaataagaaaaaaaagagaagagacccaaataaataaaaccagaaataaaaagggagacactaaaattgataccacagaaatacaaagtatcagtagagtctattataaacatctacacgccaacaaaatggaaagcctattaacagaagaaatggataaacttctgggcacatgcaacataccaaaattcaactatgaagaaatagaaaaccagaacagaccagtaatacataatgagattgaagcagtaataaaatctttcatcaaagaaaaacccagaacctgagggcttcactgctgaattccaccaaacatttgaagaactaatatcaattctactcaaagtcaacaaaaaaatgaagaggagagaatacttccaaacttactctacaagaccagcattaacctgatactaaaacccgacaaggacacacacatacacacacacaaagaaaactagaagttaatatccttcatgaacatagatgtaaaaatcctcaggaacatactagcaaactgaattcagcaacacattaaaaagatcattcatcatgatcaagtgggatttatcctggggatgcaaggatgattcaacataaatatatcagtaaatgtgatacatcacattaacgaaaccaagaacaaaaaccatatggtcactttagtagatgctgaaaaatcattcaataaaattcaacatccctttatgattaaaaaaaaaaaacctctcaataaaccgtgtatagtagaaacacttcacaaaacagtaaaggccatatatgacaaacccagagctaacatcatagtgaaaagggaaaaattgagagccttttctctaaaatctgaaattaaacaaggatgctcactttcaccatttctattcaacacagatagtattgggagtcctagtcagagcaattaggcaagagaaaaaaataaggggcatccaaattagaaaggaagaagtcaaattatccttattcacagacaacatgatcatatattaagaaaaacctaaagactccaccaaaataatgttagaaccagtaaacaaattcagtaaggttgcaggacataaaatcaacatgcaaaaatctgtagcaattctatacaccaacagtgaacaatcatgaaaaaaaatcaagaaagcaatcctatttacagcagcgataaaaaaaatctaggaataaatttaaccaaaagtagtaaaagtttctacactgaaaacttaaaacactgatcaaagaaattaaagagaacacaaaaatggaaagatactccatgctcatggattggaagaattaacaatgataaaatgcccacactacccataacaatctacgggttgattgcaatctgtatcaaaacaccaatgagattcttcagagaaatataaaaaacaattctaaaatttgtatggaaccacagaagaccccaaatagccaaagtgatcttgtgcaaaagttataaagctagaggaattgcaccatcaggcttcaaaatatactgcaaagctatcataaccaaaacagcatggtactggcagagaaatatacacactgaccaatggaacagaatagagaacccaccacacctttacagctaactcatttttgacaaaggtgccaagaacataccttggagaaaggacagtcccttcaataaacagtactggcaaaactggatacccatatttagaagaatgaaaccaggaccctatctctcaccatatacaaaaattgaatcaacatggattgaagacttaaatgtaagacctgagagtatgaaactacttgaagaagatattggtctaggcaaagattttttttggtaagacttcaaaagcacaagcaaccaaagcaaaagcagaaaaatgggattatatcaagataaaaatcttgaaaaatattgaagtaaatatacattagtattgactttctgcaagcaaagaaaacaatcaagagtaaaaagaaatgagagaacatattggcaaactatccatctgacaacagattaataaccagaatttataaggaactcaacagcaaaaaaacaaataatccaatttaaaaattggcaaatgatctgaacagacatttttccaaagaacacatacaaattgccaacagggcatgtgaaaaaaatgctccatatcactaatcatcagagaaatgcaaaccaaagcaataatgagaggatatctcatccacttaaaactgctattatcaaaaagacaaaaaacaaatgcttatgaggatgcagagaaaggtgaacactaatacattgttagtgagaatgcaaattagtatagtcactatagaaaacagtataaaggttcctcaaaaaactaaaaataatctagcatataacccagcaattccactgctgaatatatatccaaaagaaaggaaattagtataccaaagagagatctgcactcccatgtttattggagcattattcaccatagcaaagatatggaaacaacataaatgtacatcagcaaaggggtggagaaagaaaatgtgcgatatatacacaacagagtatgactcagctataaaaagaatgaaattctgtcattttcagcaacatggatagaattagatgtcattatgttaagtgaattaagccaggcacagaaagacaaatattgcatgttttcattcatatgtgggagctaaaaaagtggatctcatgcaggtgagagtagaatgacagttaccagaggctgggaagggtaaagaggagaagacataaagagaggttggttaatgaatacaaaaatacagttaaacgtaaggaagaagttctagtatttgacagcacagtggggtgactatagttaataatttattgtatatttcaaaatagctagaaaaaaagatttgaaatctccttaacagaaagaaaagataaatgtttgaggtgttagatatcctaatttttctgatttgatcacaacactttgcaagaatgtataaaaatctcacatacatctgataaatatgtacaattcttacatatcaacataaattttttaaaagtttgcataattatcagcactaatcataaacaaacacacatacaacaaaaaacaaaccaaaaaagtccccccagacctaaactgtgtgtgtgtgtacacacatacacacacacacacacacgagacttagggcacaaatatctgcttattttactcacttccacttctctccatttaaatataaaactttgatgatagcaaataaggtcttctactttcaataacttcccaagtcgagtcactgtcttttgctgtattgatctaaggcattttcatttattctaaatagaatttttttcatcacagggcatccaaaaagacaaaatcaataacctctgaggaatacagaactccaatttttaatggttctattagaatactaaaaattaggctacagaaggacaaaggaggattaatcttgtaatttttaaatgcctactttaaaactaaactaattcatttataattctaggttttattttcaaataaccttaacataaaatatactctcttttaattttctccaagtaaaacatagttttctagcttcagacaactagactttgaagttaagctattgacttgctctcctggattgccagaaaataaagtgctctttaatgtgcagcagaaggcagagggagaaagaggaaaagattattcgggaaactgtgaaagccattgagaagggagcagtctatttccatctacatccatgactccacactgacattgagctttgtagtccctctcaggtaaggatgatagacctttgaacatgtaaatactcaagcattaatgatgataggtacccctgcttattttgttaataaacagatgctccagatattattctaatacttgtttagtggactcactgtgatacgagtgcctcacatacaaaccagataaagtaggagagctggggctcatgtaaaaaagggtctaaggaacatcaatttcttcttgttacataggagatacataaatacatttaaaatatttgatttggtttgatttgtgtattttgtcaaagtaacaacaaaagtcttagtttttctttttaattatgccaataattattttttaaggttttttttggctttttaattttttatttctttaaatacttatcctacaatagtactccaaacctcagcatcacacactatacccatgtaacaaacctgcacatgtacccccgaatctaaaaagttgaaataaaaaaattatcctataaaaagtgttagtttttgtataagacaagattataacccctgtcatagtcaagaaagctttacaatttaggtcattcaaaagcacattaatataaaccttcatataaatgaacaccaattcatcgcattcaaattatgtacacatcctaagttttccaagttatttgtgtatgtttttacctggtaaattaaattattgttatatttacaggtgccattatctattacaccaggctatagcttatatatccagaggaaaatgacaactttaggttcaccaatatttgtggaacataataaaaaatatacgggatattgttggccaatcaattttataattctaacctgaggataacatttaatttaaagtttaaggatataaaacttcacgttttttagcaaaggaaaaagtcatggaaaagataaaagtaaaaagaacaaaagtgaggttggaaatccatcttaagccaaaatgacaatgtcttcataagttaatattaatcctttaattataaattttaaaggtttaagtagtttctatgaccttaactttgaataattatgccatatggagcttttcttaaatttgaaaaagatgctgaattgttgctcaaagccttttcatgatttcaggctggcagaattccagtataatccttcagacaccacttaaaattacagaccaggaacccaagctggtaaatgctatgtcaaaatgctaagagccttttactgagtagagcacattgtagaaaacgtttgatgtgttggtatatttataaatatcaaaacatgaagctgaaaacaactatttatagtggagaatttacaaaggaaaagatgaacagattagacgaaatttaaataaaatgtttgtgtatcataaaattaaatcataaaaggcaaatgccaaagatatttgccacaaagataagggttttatcattctaaatataaaaggagtttattagatgagctgatgagaaaaacattaggaccctaaaggaagaaaaactggaaaaagacatgaacaggcaatttcccgaaaatgaaatataaataaataacaggtaaatccattgtaaatgttcaatctctcacacttaaatatacaaattaaaacaactgtttttcacaaacatgtactacaaattaggtaaaactactaataaatctacagactaagtagatactctactgaagtaaatatacattagtataaactttctgaaatgcaatttgacctgttaattctactaggattttaacctaaaaaaattgaaattgaaaatgtcaacaaaagtttatgtatgatgatgccaatctccacattaaacaattaaaataaaatctaaaagtttggctgggtgcagtggctcatgcctataatcacagcactttaggagtcaaggtgggcggatcacctgaggtcaggagttcaagaccagcctggtcaacatggtgaaaccttgtccctactaaagatacaaaaattagctggatgtggtggcgcatgcctgtagtcccagctactcaggagtatgaggcgggagaatcgcttgaacccgcaagccagaggttgcagtgagccgagatcaggctccatcctgggctacaaaggaagactctatctcaaaaaaaaaaaaacctaaatgttctaaaataaagaaataacacaattaattacatctggctgggcgtggtggctcacgcctgtaatcacagcactttgggaggtcgaggtgggcggatcacgaggtcaggagatcaagaccatcctggtcaacatgatgaaaccccgtctctactaaaatacaaaaaattagccgggcatggtggcgcccatctctagtcccagctactagggaggctgaggaggggaatcgcttgaacctgggaggcagaggttgcagtgagccgagattgtgccactgcacttcagcctggcgacagaacaagactctgtctcaaaaaaaaaaattatgttatatcaaaggccggatgaggtggctcacgcctgtcctcccagcactttgggaggccaaggcgagtggatcacttgaggtcaggagttcaagaccagcctgaccaacatggagaaactgcgtctgtactaaaatataaaattagccaggcatggtggcacaatgcctgtaatcccagatacttgggaggctgaggcaggagaatcacttgaatctgggaggtggaggttgtggtgagtcgagattgtaccattgcactccagtctgggcaacaagagcaaaactccatctcaaaaaaaacaaaacaaaacaaaatttgttatacccataaaacaggatatcatgaaacaatgaaaacaatattttcaaagaatttcaaatgacattggaatattcttagtataatgctttaaaaagcaagagatcaaattaattagtttgatcttgggcagctaagttagtatggctattttacatatacattaaattattactattatatctgagtggtggtaggaacagggaattttacacctttctccactttccctattttctaaaatatcttctatttcaaggaaggttatttttaaaatagctgaataggtttctaaaaccattgtccaatttagataccaaagtttaatcaaacttctgaaaattacacactatcatcacttagtaatgttctttaatttttcaaaagttcatattttatggactttgtttcaattaggtttgaaaagattttaaaaggccacaaaagaagctttcactttgcaaaatgtcaatcatttactctcttggattctttatttgaagcattttgaccttgtggaggtatttcatgtttctcttaactcaaaatcattgaagatatcatttgggtctaaattgctgctgacagaaactcaggtaggatgtggacttaggaattcttttataaccttaacatcgtaagtgctactgaaacaacacagacccatatagaatgtcacactgagattatttattattctggtattattgtcctttcctctttgaacctcaactttatactcaatgatagaaaatgaacttctaaacctctgaattcttgactgggttttaaactgctggcaaatattttaaatttcagatttatttaaatacgataaaaacatccaacttaaaaagatactgtgagaagagttcaagcaactggcagaatgacataacagactcacaaaagaatcagcagcttgttagttttattcaaactcacagtaaaaactcaaattttaaaaaatttgtgtagaaaaattcaaagtatgtctcaataaagattaatgctatgtttttaacttattaagtgatatgaaggaaatcaaaacactaaaagaacatataaatatttgaatacaaagatgtatcatatcctacccaaagtatttataatgatttgagatcaaatgtggataaatcaataacagtttattcacatgaccaggcacagaggctatcttgaatttctcagtagattatcattctttttgttttgttttgttttgttttgttttgagacggagtctcgctctgttgcctaggctgaagcacagtggcgcaatctcggctcactacaagctccgcctcccgggttcacgccattctcttgcctcagcttcccgagtagctgggactacaggcgcccgccaccacacctggctaattttttgtattttttagtagagacggggtttcaccgtgttagccaggatggtctcgatctcctgaccttgtgattcgcccgcctcgattatcattcttttattcactcacttaatatttaatgagtgcttactgtgtgtaaggcaccatgcaagctcctggggcattagaaacaaatatttcctgctttcagggaattcggagtccaggtctttactgcatttgaaaatgctaaactcctttgactatttatgtaaaaatatcaatcattggaaatacaaattactcgatgtgagcacagcatttagatatcatcatatggactctgaggttggtgaattccaccaactggacaaaaaccgaactcatcgcactcaacaccagcctatgtaaaagagagtcttccctttccccagactctccctttttgtcaacaagtccctccattctggttcatctcagtacctctacccatgtcagctaaaagaactgtcctcaaacctcccttctaaattctgggatcccttgtgttctcacttcaatccaggagcattccattcttccagatgcaggatacccatgctccctcctctacctgcagaactccaattctataggaacaaattcccttatatcttcttcctttccaaggcattccactgttcagctggaagcctgtttcgctttttttgaaactcctcacctaagcagactactctgattctttactaagaatacagatgctattagctacaaggtcttttcaagtcttgtcagagagcttctctatatctttaccaatgcttgacttccttcctccattggtgaaggtcatgcctcctgtcactcattcatgtcatacccggagggcacctgccccgagctgggttttctaggcactggtggtacagaagtaaacaagctagacaaggtcctgctaacagagcttatgttctagtgggtgggaggaaacaagcgaacaaataaaaggatgatttcaggtaatgctatgagctatgaagacaatgggacaaaaaaaggtggcataggtaggccagactttggatgaaaaggtcggggaaggatgctctgaggagtgtagaatgatgtcaaggaggttggccattgaaaaaatcatgtggagaagcattctggaagagggtgacagcagctgcaaagacctggaggcaggggagagtgtggcacattctgggaaaagaccaatggacccttgcagccttgtagccgagggctgaggtaggcctgtgctgcgtctgtgctggggatgccattcccacctgcaccacctcacagatcacaagccatcaatgatctctgattcttcacgtcattaagctgttcctctccattagtccctttgtgtacttcaaaatgctcaacccatgttcagccccaaaatatattctctttaactcctgctgctctttggaactacatctttcttttaacatcgtattttcccaaacaacaggatgttccctcacttccacttccagacttatcttttgaaaccctgtttctgggcacacaatcattttcagcgcactgtccaagatcatcaatgactttgtggtttcacatccagtgacctttcttcaaccctcatccttcctgagtttgggtcacattcttgacaatccccctttccaaatagtcttttcctctatttccataaaaatgcattcttctcatgttccttctaccttcgtgacccttcttcaactgtttcctccctggcctctcaaatggagctgtacccctaagttcttccttcacagttgccctctctctccctccctccctgcctctttcccccttgctttaacagtcccactcactctcaaggccactggccaggccttctctgtgggtgattcccacagctgtttgtctccaatcctgcctgctcttgggatatccagaagcattctttcaacagcaagggaaagtgtagtgtcacttcaaactccacatgttcttaactcagttcagcttcctcctcctccgaccagaaacttctacattcctgatcgatttatatttaaccaacctaatcagtgctatctctatgatgattttcaaatgtcctctttgtccccttgctactgccgacactctcactgccttctcacgcacatctgctgtgccctcaaggacctcctgcctggattaatccagtccttgttacctcctgctgctgctaccacatcttgccaacaccaagaggatgatgttcctaagaatcactggaatcttgacacttcatttccccaaaacctttggcaactcctcactgtttacccaatgaagcaaaaatgcttatcacagctttggagactttcgatgatcctgaagctatcttagcttggttgctagctctcccctggatcaacctctatgtcatggaaacggttttgtttgctcttgctttccttattcttttgacttagaatgccatccaacatatctactaattaaaatcctacttatgttacttatgtctcattcaagtaacatctctcccaattaattttcccgatttcctcagcagaaaatgattttccccaaattcacactgtcttgcattatagttatctgtgtagtgtacttgcagtatttttcttgcagtcactattatttttctatttgagggcagtggccccctcccctgttttttatatacccacagtgcctgggataatgcctttctggaatataaaaattcaggtttctaatactaatttttaaattatctttaccctgtaaattagcatcacgtataaacctacatttcacgaagttcatctcctattaaaaagaggcatttggaatgtgaatatataatgcaggaaaattacggcctaaattggatgtgttatatgtctgactttggcatatccaattttcttaaatcaaggtgcacaggtatctgtgctatttaagaacatttacttagaaatactttgaactgctagaagagttgactgaagccaaggtgaagtgagtgtaagagttaacagaaaagataagtggcaacaccactttccctttccatcagtctctcttttatctgctattgtcaaagtctgagactataccatataagaatatttcctggcctggcgcggtggcttacgcctgtaatcccagtactttgggaggtcgagttgggtggattgtccgaagtcaggagtttgagaccatcctggccaacatggtaaaaccccatctctactaaaaatacaaaaattagccagacgtgctggcgggtgcctataatcccagctactcaggaggctgaggcaggagagttgcttgaacccaggtgccggaagttgcagtgagccgagatcatgccactgcactccagcctgggcgacagagtgagactctgtctcaaaaaaaaaaaaaaaaaaaaaaaagaatatttccctaattcctgaactgtatattttagcatcgagacattattattttatcctgctgtgagggaattatcactaacatcccacttagcctgaacatgtcccgagaggcccaacctattggtcttgtagtcttcttcctttcggcaaagaggaattccatctgtccactggcttgggaaaatagccttggtgctgcccgtgactgttccaccctacttcccaccccccagcatattccacgaaccaacagtgaatgctgtcaggtctaccttcagaacatatcccaaatctgatcaggttttactaccttcattgctattggctagacccagctctctattacctttcctctatatttttgcaacagcgttttaactgttctctctacttcctcctttgccatcaattcagtctattctcagcacagcagatgatgacatcctattcaagtgtgagtcaaatcatgtcactcctatgctcaaaatctgccaacttcctctactcatagagagtcaaagcaaagccctctcactggcctactcagacctacgtgacctggacccacaccctgaggtttcttctctggcctcatcactttccctcttcttctcactcatcatttccagacacaccactttccctgctgttctgccaagaagtcaggctcactcctgcctatttacagtcctttttcctatttatttctgggttcatagctatgctatcaagggccaaatctgctgaaatctgactttcaaattaattaaagtacaataaagcaagtaccttaggatctcagtctatgtaaaatcaatgtagtaatggctagtatggtattgcatactctttaaaagctcaacattatttgaagatgaagagggataggtggaaagaaattaaacaaaatttagatgattcttaagttaccctttgcaagtttctcattcccaagataaagactggtcttaagaaactcaagaggcaattttggaaacagcaattcacatttagtacctgactaaaatagttatactttttctgaacgtcaaaagaaagaatatttgagattgcacctttaatataagtccaatcaaaatgtgtaaacattatattgacatttattccaataatatatacttctaaaaagacttttcttatctcgactgaaatatcaacctgggaaaataagtcatcatttatgtgacactgttataaaaagctgtaaaatctagaaatgcttattagacaactgagggaagatctgaaacttagtcccatttaggaaaatttagggatacagccccagtatttctaatcaaaataatattggacaatattataatatcactttattacaacgtgtatttaattactatggaataggatattccatataatcccttccatgaaagccaagggaaaagttaggaaattccctagattattttactggtacttagacataggagcaagatacttaaattcctcgactgaagagtttatacatttaaagagtaatgccatgtctactaccttttggagattaaatataagggtggtggcaatggattttaaacatggatttcaactgcctattaaaaaactagttaaatatcttaccttttccagtgtcatctctgtctcagcagcatgagtctttttcagctctattttcatcttttctgattcagccttcagtttattgacgacaatctcatgttcccttgtagccctttgcttttcctcttcacgaagaagaccaagctctaccagctgctgtttccgctgtgagttcacattgatcaattcttctctcaacttgtgaacctgggcctccatgtcggcaataaccttgtttttaaaaatggaaaaatgggcagaagatatcaatagggaagtcacaaaagaagaaccaatgggcaaaaggccaataaatgaaatatgaacatatggaatagaaagcttagattgcactccatccttccttctttccttccttccctccctctttccctctcccttccttccttccctccctctttccctctcccttccttccttccttccgttccctttccttccctccctccctccttcccttcccctcctcccttcccttcccttcccttccctttccttccctttccttccctccctccctccttcccttcccctcccctcctcccttcccttccttccttccctccctcccttccctctccctccctccctcccttccttccttccctccctttccttccttccctccctccctccctttccttccttccttccttccctccctcattccctccctccctccctcctctacttccttcattccatattcccatgtcattccttcctagctcagaggcaaataccacctggaacattttaccatacttttggatctttaaacaacatattgtttagttttacttgtttctaatttctatgtaaatggaatattacatgtatttttctgaaacttgctgtttcaaatattcaacatcatcatgttcctgaaattcatccagtgttccctattggatttttactttttattgattgatttctgcttttatttttatgtccttcttcctactttcctaaggtttattttgtattctttcttctaacttcttattttggatacttaactcatttattttttatcatttcttcttttctgatttataaatgtaagactacaaatgtctctctggatactgatttagttccatctctttggtttagatatgtggtattttcattatcgtttagttcaaaatacttttttaacttccattataatttttgtctttgacttatgaaccatttagaagtatgtttcttaattcccaagcatatgggacatattagtttcccagggttgccataacaaagtagcacaaactagatggcttaaaagaacagaattttattctctcatagttctggaggctagaagtcttaaaatcaaggtgttggcagagttggttccttctggaaactctgaaggagaagctgttccatgcctgtctcctagcttctggtatttcctgacagtcactgtgccttggtgtgtaaatgcatcattccaatcagtgcctttgtcttcagatggatttgttctctctgggtgtctgtgtctctgtggtgctgtattttataaggacactggtcatactggatttagggcccaccttaatccagcatcacctaattttaacttgattacatctgcaaaaattctatttccggccaggcgcagtgactcatgtctgtaatcccagcactttgggaggccgaggcgggtggatcacaaggtcaggagttcaagaccagcctggccaagatggtgaaaccccgtctctactgaaaatgcaaaaattagctgggcatggtggtgggcacctgtaatcccagctgctcggaaggcggaggcagagaactgcttgaacctgggaggtggaggttgcagtgagctgaaattgcgccactgcactcccgcctgggcaacagagcgagactccatctaaaaaaaaaaaaaaaattctatttccggttctgtgtagacaggaaattttgagagggacaccattaaactcaggaaatggacttcagtggttattgttttgtcattcacttctaattgcactgtggccaaagaatgtagtctatctcccattaattctttgcaaattttgagaatgtttgatggcaagttatgtagccaattttttaaaagcttcatgtatgattgctaagaaatgtctatgctgtattttctacagttttcagtgctatatcctatacatgcctatcatatcaagcttgttacatagttgaaatcttctgtcacttacttactgccactaacacattagccagcaatgcaacatttcccaaaacacaatgataaatgtttcatttcatgcctaatgtatgttcaacaagcacagcctaaaccaacatttccttgactggaaaccagaaaaataaaaaagtgacaggaatccaaatgtcacattatgatgctgggaataagaatacaaagctaaatgatgagaagttgctttggtcaaaatatctacaagaattatttcattttcaatataaatattatattcatccaatttttaattttaacaattttgtgatttctacatgataaataataattgctataattttgagtgtttactttgcaccaggcatcttattttggattgtgttcagtatacattagctcaactattaaccctgtggcctctctacactagactggaaaagacatctagaacagtaacatttgtgttagaggaaagaaaatgctttatagtaataaatctgagccttcgaggctggaggtgataggatgtcccatttttatcctgcctttctaagaaaagcttacttgaactagtcccaaaggaatatgtgagaggactttatataaaaggctgatccttgtaaacctgtagtggaaaaattagttattttttcttcaggaaatctatgcactgttttaacatctatttgtttctctatttcatagattgatatctgtgtatcaataatcagctgtggatcaattgtccgtgaaaacagtcttttaccttttgttctttgttttataatgattcttttgaacccaagagaagagatagtcaatgcaatcagattctgaaatagaggatacatcttctaaaaacagatagactttagcagtgacaacagttatgtgtttgggaggcagaacattctttttttaaaaaaaagctcagggatatcaacatggcagacaaggatgggttgctggctcccttccccaaaatcaatcctggagaaagcacaggaagcatgaatctgagatactaataactataacaataataaacataacaaaagcaaattttgagaagctcctgggtggaataaagacagtcctaagggggtacagcctggggaagaaaataatagaaaaccgctgtaagaaggtgggttgcaggaatgctttaccttctgctcttgtctctctcttttgtagccaggtaaaatcatatctgttccattaccatgttgggagcaagaactcaacatagtgttgacatcagtcagtcaataccaaggaaagcaaagccctccttgggtgaggagttgaagaaaacaggcacagacttctctgaacttcctgggtattcccccttccaaaggcttccctccaaactcccaggactagtgactcagtcattagacactcacttccaggagcttaggtaaattcccgaccagcaggttttcctgatgaagtaactgtgaaagggagtggtacggcaatgaagggctctgtcttggggttcataatcttgtccttctataagctcatccaacaggtcagggactaaaggtgggcttctgctcttccccagtcaggatatctgatagtcccaggggaaaatgggctccctggccaaagtaaataaacctgaggagcaaaactactaccaaaaagagacacctaaataacatatattatctgaagcagtataattggaacagatgaaacaagaattttttaagtgcgtaataggccgggtgtgttggcttatgcctgtaatcacagcactttgagaggccaaggcaggtggatcacttgagcctaggagttcaagaccagccttggcaatatagtgaggctccttctctacagataatacagaaatgagtcaggtgtggtggggtgtgcctgtagtcccagctactcaggaggctgaggaaagaagatcaattgagcccaggaggctgcagtgaaccgtggtcataccctgtactccggcctgtgtgacagaaggagatcttatctccaaaaaaagtccataataaacatacaaatagtaatatatatatacttaatatactgaaaagtgtaatggaagaagttacagacatgaagctgcaattaatgtcatagaagaaggaaaaagtgaaaatgataggaaaaagagcaagttagctaaagccaaagaatagaattgcgcattggaaggatggtaagattgaagaactccctgggaggcagcagagaaagataataatacagaaaatgtaaaagaaaagctaatatttgtggaggacagaggaagtgacaacatctaaataatagagtctgagaaaaatagaattggaaagattttatccaagctcaagctgatttgaaagtctgctttttatcacatactgtatcatctcaaagtattaagaatttctcttaaggaagagtacatatttattgtactttattaatttgttattgtgcgtttctatcccctaattttcactatggttagtacaaagttaacatccaaaagccataagtccataatgtctttttttgaaaattaaaaaatacatacatttttatagatttgggagcataagtacagttttgttacttggatatattgcatagtggtaaaatctgggcttttagtgtaactaccaaccaaatattatacattgtgcccactaggaaaatctttaaaaaatgagcaaaaatgttagttttccaaaagcagtgagaccatcccaaatcgagtttcaatctctgtcaatgtaaatcaaagtattgttatgcacattgtcatcactgtgtagatactgttctatattttcacacacccaattttaatttaattcccatttattagcatatttgtcatatttagtggctccctagtatttcacccttccagtacaggcatatcacagagatattgtgtgtttggttcccgaccacctcaataaagcaaatattgcaatgaagtgaatactgcgatgaagcaaatatctccataaagtgagtcacataaattggttggtttcccagtgcatataaaagttatagactattcaggagtgtctgagggagagaatacagtcatgggttcttggtttctgtttctggttgggccagtaaagccccttcctcatccctcttttctgcttatcactaaagacagaaactttaaaaccatggcttctggctgctaaaagcctaaagcaaaacaaaacagaacaacaacaacaaaataaggtgggttggacaagcttgcagtttattcagtgagcattatgtctaaaaaacaatgtgcattccttcatttaaaatacattattgctaagaagggttaatgatcatctaagccattcttaagtcctaatctttttgctggtggagagtcttgtcttgatactgatggcttgctaaccgaactcctgacctcgtgatccgcccacctcagcctcccaaagtgctaggactacaggtgtaagccaccacacctggtcaatgtttattatttcaatgcattaatggagtaaattatattataggttattttcaaacgttacatcaaccttaggttacattcaattttttccataagataatattactggattcagtttgctaataatttgctaatgatttttgagagactgacctgagggatttttttttttggactctccttggcatatttttaaattgatgttatgctagtctcataaattcagttgctgaatgatgctacctttttcatcctctgaaagaatcagtataagatgagttatttgtttcttaaatatttagtggaactggccagtagggccatctgggcttgatattgtatatctggaaaacattttgactactatttcaatttttctgatggttataggatgattcacattttccggtcttttacagagtcagttttggtaaatttttatagtttaggaatttttcctcttcccctaaatttgacatttgttggcatttataaatttctatgtccttgcattctctacaacttggtgattacatacgttatttttatacattattggacttgatttgctaataattccagatttgtatgtgtgtgttcatgagtgagttggcctggaatttttatttctcttcttgtaccagtcatcttttctatcaatattacaatcttttaaattggtttgagagtatttttctctttctcgcttctctggaaaagtttgtaaaagactacagtgacctgtcccatgggagatttttatagaactcacctgtaaaattatatgaactcagtgttttctttgttgaaagatttttaactgtttttaaaatttgcttaattatattagattatttagtttcctgttttgtcttgcggcattttatgtattcctggaaatttgtccatttcacctgggttctccaattattggcataatgcttttttaatatcttatttttttaatctctgatgatctggaatatatcctttttaaaatttaatgttattaatatctctcttttattgataacattaccatagctttatttttattcccaatattgtttatttgcactttgttctttgatcagtcctaccagaaattgcttcatttttctaacttcttaagctggttgcctacttcattaacaattaaccgtttaaaaataaatggcaggttaagtgtacccatttctctcattttagcttcatccttcaagatttgagaagtactattttcattatcaattatttctaagtattttaatttaaatgttatgaacttatttttgattaggaaatacgttgacattgataagaatttataagccacaaaagtagatacagtaaactatcttccactcacccggactgtcatcaataaccacctcatccccacccaaaatagtaccaatgtaaaaagtgtcaaaagtgtcttaggtctaattccagaagatcaattcttaggtctaattccagagatcaattcaaagtgcttttaattttaccttaattttatcttatggaaaaaactgaatgtaatctaaggttgatgtaacgtctgaaaataacctataatatagtttactccatcaatgcattaaaagaaaaaacattggccaggtgcggtggcttatgcctgtagtcttagcactttgagaggccgaggcgggcagatcacgaagtcaggagttcaaaaccagcctggcaacatggcaaaacccgtctctactgaaaatacaaaaagtagctgggcggggtggcaggtgcctgtaatctcagctacttgggaggctgaggcaagagaatcgtttgaacccaggaggcggaggttgtagtgagctgagatcgcgccattgcactccagcctgggtgacagggtgagactccatctcaaaaaaaaaaaaaaaagaaaagaaaagaaaagaaaaaacattatgattatctgaatacacagaaaaacatctgataaaattaaacaacaaaaattcttagcaaaagagaaatagaaaagatcactttaaccagataaaaggtatttgacaaaagactcatcaaatttcatttattctttattgtgaagttttaaaatatcccttttaaactaggaagaagaaaagaaggtctactatcatcacttgtattcacaagtgtatgacaagaacataaaaaaaaaaaactgggccaggtgcggtggctcatgcctgtaatcccggcactttgggaggccaaggcgggcagatcacaaggacaggagtttgagactagcctggtcaacatagcgaaaccctgtctctactaaaaatacaaaaaaaaaaaaaaaaaaattagctgggtgtggtggcgggcgcctccagctacttggaaggctgaggcaggagaatctctttaacccaggaggcagaggttgcagtgagccaagattgcgccacggcactgcagcccaggagacagtgtgagactccatctcaaaaaaaaaaaaaaaacaaaaacctatctttaatcatagatgccatgacggtatatataaaaaatgaaaatgaatgtacaaattattagaaataagagcttagcgtgatgtctgaataaatgatcaatgttcaaaaagcaactgcagtttttatacatcagcaaaaaaattataaacatttacagctatgacaacaaacaaagaatcttagaaataagcctatcaaaagatgtgcaaaaccctaaggaaaaaaatataaggctttttgaaagacataaaaggaagatctaaataactaagagatatatcagggtgatgaaagtctcttcatcagttctctgcagattaatctagagtgtaagtccaattaaaacttcaagaagagctttcgacaaggtggatctaaaatgtacagggacaaacatagtaccatgacatccccaaaaagaacaggcggtgtgatattccctacaagaaatttgggtctaacataatgttatcataatcaacacagtatagtcttatcatagagaacagaaaaaaattgaccaatgaaacagaattgagaacctagaaacaggctcacactggacagagctggcattacagtttagtggggatgtgacaagccaatgtattctaaaaattacgctgacacaagaagttattcatattgggaaaaataaaagcaagcccctatcttacacaatggacaaaaataagttatttccatttttaggtctatatccaagagaaatataacttatgttaacacaaaaacttgtaacatgaatgttcatagcagcaattttcataacagccccaaaggagaaaccaccaaaatgtccatcaattgatgaacacgcaaatgaaatacagtatatccacacagtggaatattattcagcaataaagagaaatgcagacctaatacatgctacagtaggaatgaaccttgaaaacacgctgagtgaaggaagccagtcacaacatattgtgtgattccaatattttacatgaaatatctgaaacaagcacatctatagagatagattagattagtggattgtctaggtctgggagtgttgagtggaaatgaagagtgaccattaatgggtctgagtttttggagagaggtgacacagttaatggtgaagatggttttgcaaccctgaagatactgaaaaccactgaatggtacagtgtaaataggtgaattgtatggaatggcaattatatctcaataagactgtttctttttaaatcagttcttagtggatgagaaaccaaatgtgagaccaaacttttaaaaatatgggagatggctttatgacttcaaagtaaggaaaggcatgacttaaagggcactaacttgaaaagattgatgaattagattgcaatacagttaagaacatttgttcatcaaaagacacaagaaagagaatgaaaaactaaatcacaaactggaagggaacatctgcaacatatgtaacttacaaaagaatattatccagaatgcctaaagtatatcaacaagtaaaagataaataacccaacagaaaataagtaaaaacaatacatgactaggcacatcataaaaggcaacattttaatggtaaacatgaaaaggtgcccaacttcattagtcatcacaaatgcaaattaaggctattttgatatcattttacaatcaccatatttgcaaaactcaagaagtctgacaataccaaatgctggcaagaatgtgtatcaatgggtactcttacacattattgatttgggtgtaacgtgataaaaccctactgtaagttaacttggcactacctcggaaagttggacacgttcataagctatatctgttgagaatctcttacacgtgaacaccaggcacatgcccaataatgtacacagcagtatttgtaccataactcaacttgtccgtcatagttgtcattgatttatcttgatacaatggaatattatatacagcaaaatgaattaaccagagctgtgcacaacacaatgggtgaatcttaaacataagatactgaatgaaaaatgcaaatcagattacctacaacatgcaaccatttttacaaagttcaaaaacaaacaaaaataatattttgttcagagaatatatatatgtacaataaagccataaaacattattaggtaactatcaacacacaattatgaataatggttaactctggggaagggtggttaggaatatgggaaaggaaggagcacacaggtacaggcagcaattttaatagtgttccaattcttggccgggcatagtggctcacgcctgtaatcctagcactttgggaggccaaggcgagtggatcacgaggtcaggagatcaagaccatcctggctaacacggtgaaaccccatctatactaaaaatacaaaaaattagccgggcgtggtggtgggcacctgtagtcccagctactcaggaggctgaggcaggagaatggtgtgaacccaggaggcggagcttgcagtgagccgagatcgtgccactgactccagcctgggtgacacagtgaaactccacctcaaaaataataataataatatgttccaattctcaacttgagtggtcagttcatgatgttcattttgttgtatgtattagtatttaaatattaattatgacatattctttgtatgtatcagacactagataaaaattttaaaaagatgacacagacgttttaagcccagctgacaagaagaatgcttctaaaagataatttcttaaattttaggacaataattatttttaatacattgtaagagtgctactatttattatggaaatgcacatagcccaacaattttgctttttttgtgaatatttcataggagacacttaattctaattatgtttttgaatattacatggcttcattattccttacttttgtttagtatttaataaagttaattaaaaaataatatattctcttcagaataacatattagtagttctagtaggcattttaattatgtattgttaatattaaggccaccaaatttatgattttaaatcatatgaaatgtatcaaaattattcctccattttcattattctggacacaatacacatacttggatttaagcttataaattcaaaaaaatacattattttaatttacggtcttttagtctcctaatattattttgtaaatgtcacatgcaaaagaattttctttcattttataaacaactcccataagaccttaagcataaaagaatttaaccttaaaagaaaacatggcttttgccttccaaagataaaagttactactagaaataatgacagatggttaatttgtttctaacaaattaaatacaataattaaatactaataagctctgttttgaagcaggagaatggtgtgtcatgagcacgacgggttcaggccataggcatgattaaaaataaacaaaatgggccgggcgcggtggctcacgcctgtaatcccagcactttgggaggccaaggtgggaggatcacaaggtcaggagatcgagaccacggtgaaaccccgtctctactaaaaatacaaaaaaaaaattagccgggtgcagtggcgggtgcctgtagtcccagctactcgggagaccgaggcaggagaatggcgtgaatctgggaggtggagcttgcagtgagcgccactgcattccagcctgggtgacagagcaagactctgtctcaaaaaaaaaaagaaaaaaaaaagaaacaaaatggtagaagacagactattaggaggttttaattcagcacagtctgaggcagaggtgttcctagaaagatgagtgcctccacggccaggcacagtggctcacgcctgtaatcccagcactttgggaggccaaggcaagcagatcatgaggtgaagagatcgagaccaacctggccaacatggtgaaaccccgtctctactaaaaatacaaaaattagcttgacagggggcacgcacctgtagtcccagctactcgggaggctgaggcaggagaatcgcttgaacccgggaggcagaggttgcagtgagccaagattgcgccactacactccagcctgggcgacagagtgagactcctcaaaaaaaaaaaaaaagtgagtgcctcctgggaactctggatttgacacaggtttcagatctttcagatttttgatcctcgggcagtttgccactccatgtgtccacctaactatccattacctcttcgagtcatattttaagatgctgggttgtctatgttaatgtgcctaagtgtccctttcagaagagctgtagccttgtttatacccacgatgtagcaaggaagcagaattttcaagatgtggattagatttcaagagaagcagtccaagctcctgacttcctcatcactggaaatttcttcccacagtgaaagggcaaggaccctaataactggagccctgacgccattcttccaccttcctcgacattcttcagctggtcacaaacacaattagttagtgatacagtatggaagtgactaacctttggtcaggcattatcagaactgcttcattcaggcttctgagagcacgatgtcacagaattcaaatgtacttgtgcttcttatgtaaattatgagtgagcgtagactagaaaggctgaggcgtgcctgctcatggctgttggctaaaggaaagagcactacaacaccaccggcatctttattattacaaggacgtaaatgccgcaggaccaaaaacctcccagatgagtaaagatgtaaaatgaacatctaatttctctactggtcacatcatgtagaaaaggtcagagtgctactatagccactatagccactcctgcagtgggtgggctttttaggggtaagcaagtgtgtgtgtgtgtgtgtgtgtgtgtgtgtgtgtgtgtgtgtgtgtgtgtgtgtgtacatatctatgtaccttttattcacttggtcctttcattttactttatacaggaaagactgtttttttgtgtgttttgtggattttttttgagacagggtctcactctgttgcccaggctggagtgcagtgtcatgatctcggctcactgcagcctcaccttcccaggctcaagcgatcctcccacctcagccttcccagtagctgagatcacaggtgcatgccaccacgactgtctaatttttgtattatttgtagagacagggtcttgccatgttgcccaggatggtctggaactcctgagctcaagtgatctgcccatcttggcctcccaaagtgctgggattacaggtgtgagccactgcgcccagccaagaaggactgttgcagttggtgtgcatggctcgtatataagtgagataactagcttagggtaagtatcatacagtgagaactaagcgtactatattgaggagggcaagttgctagatatatatctataatactgatggcagcaatgggccgtccagatccccaaggcaacctagtgcaccacccacacccttgcacagctgggcaggacccacttccaggcctggagcctctgccacggcctcaacctccctccccataggtctcaggagcccaccagcacgtggctgaaggtgcagctggggactcctgaagccggtcccaagagcatcaggtttgcttgggcagggttggctggggttgccaggccacctgcccctcacctgccactgctgcagggaaaatgcagagagaaggtgtgcagtgtgcagaacccactcctgggaggcccctggagcccgccactctgggagctgttttgatggggtccggccgcgtcacctgacagtggcggagcagcacggttgggcacagaagggtggacagagaggtgccctgaggcggagctgggcccagggcggtgctgcgctctacacagccggtgggagctgggagcaggcaggagcctcaccctcctgggtgcagctgtggtcactcaggtcggggctgtggacctgggcctccctgtgctctaggggtctagaagcaggcaggagccctgccgtcctgggtgcaactgcagccacccagacgcagccacgtacccaggcatctcagcactctcgggggcctgggaaggccccccatttccccaacagggtcagagatgtctgctcccactgcctggcctctccctgctcccggcacccactccaatcctggagcaaggttggggccgagcccaggtgctgttgcagcctggccggttgtgcgcaccctcgaggtatcacggacacagcagccccctgctgcctcagtcccctccagactttgggcaccaacgggcatgggagggaggccaaggcggggctgagggcagcttggcactggcctgcgccccttggcacaaacagcctgggcaacatgaatggcagcaggaggcagacaggcttctggcaggaggtgggtccctggtgaagccctaccttcaagccagggagggactgaagcctgggagctgggctgctggtccccgcagatggcagtggaaacctgtggtgctttttctcggcctgccatagccatccatggaccaatcacaggcacttcctcccctctgaggcccataaaaagccccggacccagccatatcagaagagacaaaggatgaccagctgacaagaggagctacccacctcagggtcccctctctgctgagagctgaacactcattgggacaacctgcctgcagagaggagctaccctctctgctaagagctgaacacctgtctagacaccctggctacggagaggagctacccactctgggtctcctctgagctgttctattgctcaataaagctcctcttcatcttgctcaccctccacttgtctgcatacctcattcttcctggacacaggacaagaacttgggacctgccaaaaaaacaaacccatgccccttgctcaccacattgcagatgacaaggagagaggagagacgagagaaggagaagagctgcagcccttcagggagcccagactcaggagctccccaagccagggctgtaacatcctctttaaagctctgcggttcctgatgtctccaagcttctgggtgccacaccacattcccctgtgtcagccatggcagctgcttatggtatgcccagtccagctgcaactttgcagggagctagcacacctggagctgcccgccccaccgctgctggcatgccggcctgtgcacagcagctggaccccatgctcgctcacatactattcaccactttgagtgggatccaggcaggtaatgcaagctgacacagcctgccaggccaagtgggtgaaacaaacccagtggaccagagcaaaacccaggcaaagacgccactggccacagaggtttctggctggtgaagcaacaccccaaggatcctgtaacaatactctaatcttactttgaagattttgaaaatactccaggaccatacagtaattcaaagtcattattacaaagaccaattatcaatgtaaagtcacataaatgtataaagtttaagagattggggttaatctacagaagccagatgaatatcctgttaagtaattttgaaaaaaaaattcttgtttttagctatttactttaatggagcctatacatttaaattctccttacctctttttctttagattctaaataataaggagtttattatttaataacttagctttatttattactatgtatttcccattttaatgtttttatataaatcaccccaaatttgttcttagttatatgtccctaaaatttcactgagactgctgtcaagttggaaatactgagagataacttttagtgtctgcagcggccaacttatgaagtaaagggggaatgaagtcacccatggctattttttcaaataatgttgaaggggaaaaaaaaccctgatgactaggtttgagaatacatatttctgttatttataacataaaatcgaagtatatatttattatgagtttatattatatgtattaataaattttttaaattaaaatataaagaagagatattctttctgttatatttggttcttgttcgttatgtcaaagttatgaatgaggcaaaacttcagatttttatttgtctaaaacttttcctccaccaaaataaaatatctcattttactttttaataaaagaaatacattgatgaccaggtgcagtggctcacacctataatcccagcacttcccagagggcgaagaagacggatcaattgaggtcaggagttcaagaccagcctggccaacaaggtgaaaccccatctctaccaaaaatacaaaaattaactgggcatggtgctggacacctgtaattccaggtactcgagaggctgaggcaggagaaacgcttgagcccaggagataaaggttgcagcaagctgagatcatgccactgtactccagcctgggcaacaaagtgagactctgtctcaaaattaaaaaaaaaaaaaatacattgaaagaaatatgcattttgagatttatcaaatatatagaattgatgttttgaaattgaatatgcagatttcaaaggacagcatacacattaaaaaacagaatatattaggaaaatactgttgtatcagtaaaaaagaatattttggataggttcaacctgtcaatttatttcatggagactgaatttatataatgcatacaactatatatatgttcattagcatttaaaaactgaaattcatctaaacagtgaaaattaaaagcatattttactatacaattatacaatatgcgttttaacattttttggaaatgattgatttcaaattaagtcacaagttatatagttattttacaggtgaggcaacattttgctgtacgtttctgaattaaagtttacatttcttatagtatttttatagggctcaaatttgaacacgtgttctcataagttattgcatagacaggtagctggtaacagtagaaaagagacacattaagggatgcaggtaaagtcacataaaagtccgggcaagaaaccagcccttcagatgcctaggtcagcacattttctatttttaacctgctgcattctaacctgcaaatagaactttcttcactaatattgtctgtgctttatcaagtggaaaatatttttaagatcccttaaatgaccaagagctatttagaaatacagccagcagattacctttaaaatgattcaaaaattgttctgagagccaataaggcatatttggtattatcggaagtgcatgtgtgtttttcaactcttgttctactattattattagacctagtaattggaaatgaaatcattagcccatcttgtggttcggtgaaaatatttcctctgcaacttgtaaagatgaagaagaggcttaaattcacccaaactccaaagaataggttagctgtggaaggaattctatacacaagactaaagtgtggcacctttgttcacaatgacactagtaaactacaagatgaaggagaggacagaacttaacatataggaaaggcaagataaactttcttttttttttttttttttcagacagagtctcactctgttgcccaggctggagtgcagtggtgtgatctctgctcactgcaagctacgcctcctgggttcaccccattctcctgcctcagcctcccaagtagctgggactacaggcaggcgcccgccaccacattcggctaaatttttttgtatttttagtagagacagggtttcaccgtgttagccaggatggtctcgatctcctgacctcgtgatccacccgcctaggtctcccaaagtgctgggattacaggcgtgagccaccacgccaggccgataaactttaatttggttaaaaactttagaacaattaatacccaggtttggagcacactacaaaggtctaatgtcaagaaaaaaaaattatcttgcctgcaaaagaggacagtactctaggtagagaataagaaagaaagaaagaaagaaagaaagaaagaaagaaagaaagaaagaaagaaagaaagaaagaaagaaaagaaagaaagagaaaatacaaagaaaaaaaagcaatcagtgtatgtgcttatctgaaaggggagaaaacttcaaaaggagaattaaaacatgttatgagttcacatgaactggaaagcattatggctacatttgtttttttgtgagtaatgataccggtaaagattcataactgatgttgaaatttctagttttattttaaaagaactagccacatcatctaattaaaaatagatcttaaagaaagtgagttaaaaactccataacaatctgctcctaggttaagttaaaactaaaaaaggaaaaagaagtttcatagcacattgatctattttggaaaattgcaaatgaaatatctactacacgtaaaatagctatgtagaagcatttattatataaattaaatgattttaaaggtaatagaagtactatatattttttctagactcaaatagaattataaaagtagaaacattccagttgagactgactgaatgacactgaaacaaaaataccttcaaattgcacttttaataaccttatcctgaaaaatgcagaaaatcagtattaaaaagccaatacaggtgcattatccataactcactctggtgcaacatcagggctcacaaacagaaggactacgtgtcaggaagatgttatttgcagcatctagaaacacctaaagttattttcttgacagagtttccaggagtgacaggtaacctatttggccttcgaagaagaataaaattcaggctgaattcttcttcactagaaaactacttttataaagaatgtcattcaagtaattggagagaaggttttcaacaccctctccacttactgtacttcccctttccagggaagcagagttttgacctaggttttttgccagttctgtattagctgctcaacccaaacacgatacacactaaggttgcaaccacccacccacattttatgagtgtcattcagaacacactaattactgtgctaacaatggtaggacattactaaagtattctaaagttttggttgcttaaatataagaaattctacaacactgggacacaaacagttgaatttttaacaatgagatgaaagaaaggagagtgctgccccctgtgaagtggattccagtggctgcctcggtcagaatcatcatggtgatgatgacttcttatcatgacttctaacggcatttccctcccatcatgtgcacgttttggtgcactgtgttcactctgtgcaactactactttaaatacatgcaggccgggcactgtgctgtggctcacgcccagcactttgggaggtcaaggcaggcagatcacgaggtcaggagatcaagaccatcctggctaacatggtgaaaccccatctctactaaaaatacaaaaaattagccaggcatggtggcaggcgcctatagtcccagctactcgggaggctgaggcaggagaatggcatgaatctgggaggcggagattacagtgagccaagatcgcaccactgcactccagcctgggtgacagagcgagactccgtctcaataaataaattaattaattaaattaaataaataaatacatgcagagagaggaaatcactctaatgccattaatgcattggtgttgaatatctccaggacagcaacatagtatcctcgctagacaacttgacctcaaaggacaactttactgaccaggtgggcctccccaagatatcttcagtgtcagatgaccttgcattatgtttatagtgtcagtagagagtggagttaccttgctcttaatccctgcacctgtcaaagcatcttggatgacttttacatcaacgaagcaaccccatgggactatgcaacaatcaatttactataataatttgtacttttgtacatcaccttcttatttgctgctttttttctctattcataaaatgaattcacctgatataaaaataaattgtgtgggcaaagccaaagtaaataactagaaaaaatgcactaactaaattcatggtaatattatttgcctctggttaaaaatataaaatacataattgttaattttaagttatttatcccttttcaacatttaaaattaccttttaattatattaacatttttgggtttcttttagctgaggcttttataagatttaacataaaaaggctattcttaaataaattcaagtgtatattcaaaaggtataaatagctctataataaaaactggccaatagacattagaatcataatacatgattattacatacatacatgagaacaataatataaaaataaaggttttaagttaatttacagagggatttagactaccagttttaagaattcatcttactaaatataatgttaaattcttgtcattatattcttgcatctggtaaaactagacagttatgaaatttaagaaaacttattcatcttagatattcaaccatttagctacagacacaatgatcctaattataacagtgtttaaaataaaccaaggaacaaaaactacctagatcaaaaccatggacaccaatagattttcaagacccacagagaaatgcagtaagcaagtttagagatgaacaactaaaaaagtaaatgtggtttcattagcttaacattttaaaatagctttgtgaattaattttttcactgaaaactaataaacatcaaatgtattttgaacttgacatttttgataacaaaatcttctacccaatttagctcacagctcttctaaaaacattccgcaattaaaaagctttgtccatgtaacttctactagtccatattcaatgggtttccaatgcctgttaaaacgactggtagcctactagttgcatgttgtacttaccgagagtacagaacaaggtcacctgatagtagatgaggtacataatttacgagattgttttcctttttgttaacctaaaaggtccagaaactcctttcatcctctctgtcccatgcaacttcaggcaccagcttgcactctccctcccactcattggatcattccctgggaaggaaggacatacccacactcaagccaaaatgaatcttgcctccaagatgggctggcagctaggaactctggtcatggtcccatcgggctcacctgcctgactaaacctttttgttaccctccatctctgatctggatttcttaccttacacttgtcactaaactgaggttaccaccagtttctcaaattgttttgtgattacattcttgactttcggtaattatgttcttttatctcttgctttaactacctggactcttgaagttcattccttgacctcttgatctgacttcattaacctcaagctgacttacttgagtttctgacccatcatctgactctcctaataatttaatggtccctattaatgcttaccttagctatccagcttctattctcctccctttgccaccccctgcagtactgagattactagatttattctagtaaataaatatccatttatcccccagcacacctaagtaagttctagcaggaaaataactacctgcaaaatgttgaaagagaaatgcatgttgccatggatacagactatatttatgacctaacctttattccatgtagttccaaagcaaagaactagccaataaggaggcaggaacttaactaagaatgtgatccaagaaatcagaaactacatattacttttattagaagaaaattatataaagtgtttttgtttggtttttgttctttgtccagtaaaagatgccttgaatatgggtatatagcatataccaatttcatgtcataaggaaagaatttttcccagtcctgtgtgattacaattgagtgtatataataaagtagatgctgttgattaaaatgctctgcttaatacaaaccacatcagttaaataatactctgcatttcaattctacatttcagaaaaccattatatgtatgcatatgtgtacagatattttatttgcttaaaattttacaggtagcttcacagagttatttgaaatctttataaatatgtaggtattgtcatttccattgaaaatgataaaaatgggtgctcaaaaagatgggattaaggtatctgctttagttcacaaatcttgcaagtaggaatcagagttgacacccataccttctgatttcacttttttgtacttttagacagcactgtcttttagttaacaaaagcttattgctctagatatcatagaaattatttacagaggcttagattccagtgacgagggcactttcttaaatttttaacaaaatctttaacgaccattattaattttgttttactttatcaacaattgccagctggaccaataacactgattcagctaacatgtcaatacaaaagaaatccaaagtaacattagtgggaaaaagcacatgttggtttcatccagatgaaggtacttcccatgtattggcaaattttctctctgaaataatgtcattttattaaagcctgtaattttgcttctctcttaaaattttattgcatcataaaattacatttcaacaggatgttcaagatttattatgaaaattttgactcaatctgtctttgattgattgccactaatattttggttttccatgcagtttctatttcttacagcatgcttcctaatccttctattagatttgatatcttcaacttactacccacattgtagacaactatattacaaggattatctaatgtattctctatattgacaaaactatgcctgtaaattattctttacatcgtaatcaaaaatgtgtcaatctttgttaaagtatctatggtttccctatgctaccttaactgttcatgacagtaattacctaaatgatacttatccttgtcttcttaaccctaaaatgtatatacctttgttccactgacagtagatatatcttactgaccattctcataagaacatagtaaatgatggtatcaaaaaatgttttacagaaggcaagatagctgtattccaaaacatcagatagagacctaaaatgtcttttaaatatctccaaatttctctgaaaaaaaattgatgatgaattatttagtcagaaatttgtccaaaccacagaatataattctttggaacatatcaggaaagttgacacaaatagaaaaagaacagttagaccaatgcattgccaaaagttttctttacaaactttttccactgaatgtttgttttaatttaaaaatacacataatcaaaccaagtagtatagaaatgcccttaataaaaccattacattatgacttatgactacccatctgcaagtcactccccagaggcagacacattttattctttcagttatctgttttcaactctgatgatcgtgaccttaatacctttacgtacttcataaattaatttattcacaatccattgattttctgctataaaaaatatttagtttacttacaccatttactctttttcacttcaaaatacagttgtgtcacaatttttaattctcttattggttatttctataactttcaatagaataactaaactttcatttttccagaaattatgtagcatcttttaattcctcacttcacgcaatgagaatattagtactgcctaaacttcatttggcctattcattctcacaacccctattatctaaattttcacttctgttacctgcactttggttaaagttggaaacatttatgttgtgtctgtaaccatgagtatattttctatgtttcatgtataaactgatttcaaaatgtgaaatttaatacgtagagtctaatcattattcaaaacacaaccagataatatgttacataactacaccttgtttctggcagttttttgtttctcctgaggcttctaattttcttctttctcccttgcattttctgcttttactgcctcctaacattgttgagaattctcatgaatagtatctagagtcttcttcctcacactccacttctgttccaatctggactggatgttctttccagactcactgcacagctatactgtgcaacttttctcttctcttctcctggacaagatccactgttcaacgaatcttctgtatttctctttcatatttattcctccattttatttaagaacatccatacaacctccaaagaaatgcagaaaataaactttccaaatccttgcatgcttgtaacgtcttatccaacctgagatttctatacaatattgaatattggcttatgtatagaagtctgacttgtaatttttccttttcatagttctaataaaggcatttttctcttttaccatttattatttgaaatctgatgccaatctatcttgttcctacatagaggacctgattttcctctgggagtttttgggatctctcttttattccttctgttctgaaatgtagcaatgatatgtggagacatggaccttttcttttgtgatgctggtacttattaaccttttcaacctatagacctatacccttcggccctgtaacttcattgacttcactatcattattatgtagctaattcctccactacattttctgtttcttgaacatcttggattaatcatcaatgtcttagatttttgaaatatatttttacactctatttttgtctctgcttgttgttctgttttgtgaaaaatattcttgatatcaattttggctggcctttaaaaaaatttaatttctaagagccccttcttattttgattgttacattttcagagcagcctgttcttcttttatgaatattatatcattttcgatatttcagttttgctttccttaaatcttcttttttgtatcctgaggttcttgttttttctctgtgatcatctgtttgtttagtctttctcatgcctctcaggccagccttaaacttcagataatctgcgattatctgttcctattcaaggcagtaaaatgcagatgagaagctctgcacgtgtgtgtggctagagtcggcttggtaaggggtttactgcctgattgcggcccagccctctgtctgattgcagtccagctgcaattcaaatctaatccagttttcccaccttgggctttctccaaacccagggaagcctgctaagcccaagtgcaggtgtgaccaggaagtacaggaagaggcaggaagtgcagggccatgcaggaagaacaagtgtggccaggaaatgcaggggcagatgccctttgggagcaccctcaaacacaaagagctggaagtccagggttaagtgctgtagactccctttctttggtgggacaactctgtgtacattctaaaagattacccaggggtcctcagtggaatggagtctcccttactcttaaagtagtagcttgctcaaggaggcaccctttatttgttgttctcccttttctgtctcactctcctcattccctcacttcagactcctacaatttgccataaatggtctcagggactctatttctagaataacccaaaactaagacaataccatgcaaactgaagctcttaataaggttctttgtaacactatgtaacactatgtaaaaaccctatgtaagaacactatgtaaaaaaacactatgtaaaactgcaaaggaaaatggtaggctgatttctatgaatatatctagttatccttcattccagtcgatttctatggccattagtttaaaaattagtaggcatgaaattatgtgatgtgatatgagatgtacacatatacacaatggaatattattcacccttaaatttcttcatatttgtgacaaaaatggatgaacctggaggatattacgccaagtgaaaaaagccagacacagacagacaaatactatatgatgccacttatatgtggactctaaaatagtaaaactgatagaaacagagaacagaataggcaactcctcattccagggagcattgggaagtgttggtcaaatgatactgtttcaattacacaagatgaataagttctggagatctaatatataccaatgtgactataattaacaatactgttttgtatacttgaaatttgttatgagggtagatcttacctgttctcattgcaaaaaaagaaggaaggaaggaagggagggagggaagaagggaaactgtgagatgtcggatgtgtcaattagcttgattgtggtgattattccacaatgtatatgtatgctaaaacatcaaattatgcatcttaaacatataaagctatttgtcaattatacccccaatgaagctgaaaaaatgatgaagcaaatatacacattttttaaaagtctgcttttagtgacctttaaccaatttagtgaactgctaagcgaccttgagtaaaacaaaatgatatatgtacaaaacaaagccaaccataaagacaaaaaatgggacaggcgtgtttgggggacactcatcagttaagaacagctttccaccacttttggaggagagaaaataggacaatatcgaggtgttgaggaatggaacatgctgtgaaagccggaactagtggggaggcttcagcagatctaggagcccatttagctatcacacattctcaagaggctctgggctctggtactataaagatggagaaaacagtgagaagtgaaaataaggacgagcccccaaaagcctgcatacagaggggttggacccaccccaacctacagattgtaggcagtccaggtgaaaaacagaaggctcttccctaaaaaaaaaaaaaatggaatgaacaatctgggaaaacccacagcttctagtatggcttctacaaccccagaataaagcctctcttcattccagcccttaaggggcctgaattctaacacatctattcccccaaaaccagaactcactctaaattcccactcagggagagatatattgggaggagggacagaaaagaaactccatttacacaacaaatcactatcccatctgcgtaaactgaataatgcatccctttcccaaaatgttaccttatatgtgaaaagggactcagcaaatatgattaaatcaatgattttgagatgggaaattcccctgaattatgttgtaggcccaaggtaatcgtaatcatgagggtccatatcacagcgaggccaggaatgacagggtcagaaagaaggcattgtgacaatgacagcaccaagaggacaggtgacatgacatagggctgcaagcaggaatgctgtgggcctgtagaggctggaaagtcaaggaaacatacttttttcccctggaacctccagaaggagccaaggcttccaacaacttcattttagttttgtaagactaatttcagatttctcaccttcagacctgtaaattaacaaatttctgttctttccaggtacaaagcttgtggtaatttgttacaatagcaataggaaactaataccatttccctttcgtaaatgtgactcaaaagcaagaatcatcgagcagataagaaaagccaagacaaataactatgaaagataaacagaaaaaccaaccctgaaggaaagagatatttcagagaatagaacttaaaaagcagtctaattcataaacttggaaagaggaaaatttattatatttattaaatgaaaacaagatgctctgaaaaagaaataggaaaagtacaaacagatcttttcaagtttaaaaatatgattccagcacataagggaaagcaaatctaaaaaaacattgagtgaaaagacaaaatgaaaaaaaaaatttgcaaaaaaaaaaaaaaagtcatgcaggcaaatccaggaggttcaatatacaactgacagaagcccagaaaagacaataaacaacaacaaagctaggatagaaaaattatcaaagaaatcatccaggggaattttccagacatggaaaggaacctgtaccaagtcacatcaataatgaaactttagaagcccacatattttgttagatttatttctgggaaccttgtggttttgtgctattgtaaacggtattttttaaaaaatatgttgtatattgttactcatgtataaaaatacagttgattttgtatacagaattgattttatatctagttattttgcctaattgttaatagatttaggaactgtcaaactattatttagatgacctataataacaatagttctgtttcttgatttccaatcttaccttattttttctcatcttactatggagacagggacttctttaaaatatgagataaagtcatgataatggatatcatcacgatttctgttactatgagcaaatactattttcaagaacatatgtattaaaaacaggttaaaaaccaacaaacatcaaatttaaaaaatggggggggctatcttatggaggcagacaatgtgctgaaggcagtttccattaattcaactgactgtgcaagctatgacttctttcttgtaaaatgtgatgactatttactatcaaagacctttctaagttaggctcatggtctcttctaaagaaggtagcattgtctgctttctgagttccttgtctgctaagttccttgatttagagttagaacataactgacagaggcaatgaaccaccttgtaattgtgaggtgtgaagacgtgctctgaggctggggctagctcacacctctgaccagagtatggacacatgtggccagtgctcaacatcagttaaacgtctgaatgttttttattcaagcaataaaatcttttgattgttcaacctcgggtctttacctaataaaggagcaacacttattaattccaaaatgaactcaatttcaaatgagaaagcctataattatgataaaaacacaaaaatgggccaggtgtggtggctcatacctgtaatcccagcactttgggaggtcaaggagggcagatcacaaggtcaggagatccagaccatcctggctgacgcagtgaaaccctgtctctactaaaatacaaaaaattagccaggcatgctggcatgcgcttgtagtcccagctactcgggaggctgaggcaggagaatcacacttgaacctgggaggcggagtttgcagtgagccgagatagcgccactgcactccagcctgggcgacagagagagactctgtctcaaacaaataaacaaacacccaaacaaacccccacaaaaatggaatggaaagtcaaacgctctctggaacatggaggaatgctactttttttttatagctgatgaatttttcctttttcatcatttttatgagaacaggcacagccaagttttacacattaacttcagaggcaaagcagaaaacaggtgtgtgtgtgtgtgtgtgtatgcacatacacatacattcatgttgcatgttttccccttggccatcagacatagcttcaaacaaccatcttattattttatcccttaaaagttaatttattgccttggaaagagctaaagaggtttctgaagatgatctcagacaatcttttgtcaattaactatcctcaattataacatcatacccactggacatggataaaaagaacaagtgatggctctgtggtacagcagtgccccatgacacaaataccacattcatcctcataatgacaacatgccaatggtataagagaaatatctctaaatactgaatttagtttatgtaccagagaagtacctaaaaagtcaaaccacatcaatctcaagaatcactacaaggagaccacaaaattaaaagcattctctattctgaactgcattttgaggatttcaacataaactttggaggagaaattaaaactgtgtaggaatactactgttccctcactgcggaatcagtagcacaattcactccttggttgattgtggtagcttttagcaaagaaggaaatatgggacttttgactgtgttcctgcttttcatggacatggtagcctccacagggagaaattatatggaagtaaaataattttgtacttactgaaaaacattaaaggagtaataaagggggaaaattatactcgttttgactgaaactaaagtccacaagagcagtgcccacagggcatgcactactgaaaaacagaacctcccttctgcctgctgcctgctcccagaatggcctacatctccttcttcacggttgatctcaactgattacgtctctaatactgtactgagcacataattttatatgtatgcttctttgccttttgccccttaggattaagtgggtcttattcattttggcatcttcaacagctagcaatgtgcctaaaactaagaaggcccgtagtacatgttgggcaaatattctttcattttaatcatattgccagaatggttctcggaaatcattattatttggagatttaatgaccatctctgcatattttagaaatctgagggttaaaaaatatgatatggaaacaagcaaagcccagatctaaagcaatctctgcagcatagttcaatgtattgatttgtgttccctcgttcactgattaagcatcggcacttgggccaggtgctctagtaggttattgggattcaaaacagacaacatatagtccctcctctggaagacacaaacatgcacaggataatgacattacagtaagtataggcttatgttatacatatgtctttgtcactgtatgttaaaaattttgtgagagctcaaagagatgagaatgataaatacactggcaaagccaccatccactgaagaggaaacaaacaaaaccaaaacactaaaacaagttggtggcttctctgagagcacagcaagccgtgagcctccttccctgtgaccctactcaactcttagtttgactcctcaaggggcccttccttggcttttctgtggctctaattcatcagtgaatctgccttcattaatacagccacatgcatatgtttgctgaggtcacagtctgtactaggaaccttttaggcatagggtatacagaagtgaggaaaattagtaaggtctcttttgtttcagtctctgggtggaacaaacaaatagaataataaatctgcaatttaaatggaaaaaagtgttatgaagttcacaaacaaggtgctctgatagaacacagcaaaagaagatgctgggaaggtaacaattaggtcagatcatacaaggtattgcagctcatgctaagaagtttacatatatatatatatatatgaagtgtatatatatatacacacacacacttcatctatatacttcgtatatatatgatgtatatgtgtgtgtatacacacacatacattttttccccaagacagagtcttgctctgtcacccaggctggagtgcaatggcataatcttggctcactgtaacctccgcctcctgggttcaagtgattctcctgccccagcctcccaagtagctgggattacaggcatctgccaccatgcccagctaatgttttgtactttttttagtagagacagggcttcaccatgttgcccaggctggtctctaacttctgacctcatgatctgcctgccttccttggcctcccaaagtgttgggattacaggcgtgagccaccgtgcccagccagaagtttatattttactctaagtgcaagctatgaaaggattttaagcaggggagttttctaacccaatgtacattttgaaaaagatcatcatgtctgttgagaaaaataagagataaggcaagattatcagttataagattacatagaggcctggactagaggagtgggtggcagtgaataaagtgaatggattggagatcaatttgggggactgaatctatagaatttactgacaggttaagagaaaggaaaaaaatcaagaattatttccaagttctgccttgagcactgaatgtacggtacatagggaggttgggagggagaggcttcagttctggacctatgaagtttgaggtgtttgtgaacaagctaatagaagatgtcaagagcacagaacacagatgagagacgggaacttgaaggttattagcatatagttgttaaggccactgaaatgcaggtaatcacttaacagaaacatgaatacagaaaaaaaagtgggggtagactccagtgttcaacgtgaaacagaggagctagtggagaaaacagaaactaacgtggagaagtagaagtggaagaagcaggaggaaaactgggaagatacagataatttggtaagacagcatgaaagcgttatttgcagtgatgaatatctagctacctggtgaaaagcaatgaagactagctagtcagggtaataaaaaagagggaactaaaacagaattacagagtgaacagaattatactgtgagaaatccaacttcttccatgtaattcagtaaactcttacatatctacagaaaatatgtaaggagtaggtaaaatatatttcctgatacatcctatacaaaagtgtcttatttcaggttttcttctaaagagggaaagacaagtctatgaaacattctagaatatgaggtaggctatagacagtcatctataggacttttcccaacagttaatgttttgcaaatttaaaactatacatattcggaatttattccaactatagtttggatattagtttgtagtttcttttttttttttctttttttttttttttgagacggagttttgctcttgttgtccaggctggagtgcaagggcgccatctcagctcaccacaacctccgcctcctgggttcaagcaattctcctgcctcagcctcctgagtagctgggattacaggcatgtgccaccaccctggctaattttgtatttttagtagagacagggtttctccatgttggtcaggctggtcttgaactcctgacctcaggtgatccaccctcctcggcctcccaaagtgctgggattacaggtgtgagccatcgcgcccggcctagtttgtagtttcaaataaaaatcctatttgaagagcttgaaaagaatgttgtataattattaagtctgcacaattaaatggtacctaacctcccaagtaaatggaagaacgatttttatattctgagaaatagcagatttctaatataaaagcaggtgcagattatcttgagaaaattttctaatggattgagattatttatactgatttatatttagaacattaaaaattatcactttttactttaaagtgaacttgggtttatcttctaggtttgtaatgtccctaaactactcattcagttacttaactatttggctgaagataatatttatcattcaacagcaacagggcaaagacgatgttgaaatctgctttcataaatgacttttttccagatcaatagcagagtaaggggaactattttaatgcaaaacaagtcattgttttaaagttatgttgttttcctttttaaaaaaaaaacggtttgaattaactgcctatgcttcattaccctgcaatgtacttcaacacatttacactgcaagaagaatatgtaataaaagagaagctgcatcttcaaatctttcttgtcaaatttgaagagacaccaatcaaccaaacacctcactaatagtcatgagactgctgttttaattagctggtgatatttctgactaagactctcagatgatgaaactgtttttccttgtattgaaccagcttggcccagactagcctgtcctgcagtgacaggtatattgaatacaaatcagacagcacagctttaaatctgtgttgcagctctcatttccaattcgagaactgtactataatcataagcttctggtggatgaaaggaaatcagctctctgaatattagctaatgccacatttgcaagtcctgaagagatctgtgctgttaaaaaaaatagatcatttcacgtgaacctatatatatgaattgctttgtactgctcaactgatagaagcaatgcctgtgctgggattaaacccttttcatcataaaacctcatctggttcggagtccaagtccatcaaaccttttccctttaaagtcccgcctttggttccacatcaatttattcaaaccgcagctgggtggctgaaaacgaaaggacagcatcatttaaaccaaccatgttcctaacttgaaagaggggctataattaaaaaaatgggcataaaagaatggaaatgggataatattttttaatggtagttcaaaggctgacagatgtcagagcctttgaagatgtcagtacactgagtaagaagttgccataaaagagcttgccagagaggtgaagcagctttttaatggctaaaaaaacccttgcagacacatccttgtgtttttaatttgtcagagtttctgcagtattttctgattaatgacacatgattataacggcatagcaggcatatttttatacttggttaaatgaatagtttatttcacattcttttagagctagataagaatagggacactttcctaggaagtccaaaactattctgattgattgacatatttatgctaattttgtgggactggcccaattcggaattactatatgttgccagcttttgttctttaatagtctgtttgctaataacattacaattcacatgtggtagttaaaatgcaattcactacagtttcattcttttcatgtacatggaacaatatgtgcctgaataattaatttgtgcaccaagtcatgtcaaaccaaattaatgttttaagacattcctgagctcaatctacacaaccgcgggctgccatagggttcagaagagaaagggttgcttaggggaaaaaaatgcagctataactataatataacattaatgcttactcaaaaaaacgagctggaatactatgtgcaaaatgctgggggacactcttctaagatttgggggagggacttagagtatttccaaactatatgcccttctaaatagttctaacatgtcaatttgatttgttctgtgaaattgccctcacaatattcatgaatgttaaccacaagtctctagtgagtagtagcaagaaaaaaaaaacaggtttccccaccaatggatatgcctgtaacttataaccatgatgaggtgcaggggagacagagttcatggctttgaagtgagacacattcgggttcacatcctagcccttgcacttcagagctgcatagcttgggtctgtcttcccacctgtaaaaactgagacaatacataagtgcctcctcccagaaagcatgtgaaggtgtctagcacgtaatattgttcctttctcaaactacatgatatacagaaaattttaaattaggccattttctgattgaaaatgtttatatatcacaaaatcacattttaatgagaataaccattcttttaaaagtggatgttgacatttcccaccgcttcaggaccaatagattttaagtactgtctccatccttatgttgtaatcttatatgaccatgactggtcaaacctgcaagcatacacctgtttgtgtctgacatctaaccttcagcccagtgctacaagcacacccatggaagcagctcagcaaatgcggtgctagggctcaggcagggatgcaggagagagataatattctcacgcaagatcaggcaagagacctaggaagcagagaggtggagtaggcagtgcccccaacccagagagagcagatcttgcagcaggcaggagccctgcagcctgatcctgaagaagctgacctgcagtcctcttgccacccctcaggctttctctggaaacaggagcatcttggggtttaccttcctcatggagggggtgtttcctctttcaggtctctatgtgactatagttttgtatcactaacactggggacaatttcaaagcaggtaaagtttgccttaagcgtctttctacccccttgtttgcacttccctgttttttttcttgccttgctccaacccacctccagatgtccacgtcttccaaaaactcccccagggcatcccaccaggaggttatcttccggcaatatcactcttccttctccctttacagtctttccatacatcagaactcccatttcttgagtgtaatggatttcagcttgatgagagcaatttaattagaaataatttcacaatatggtacgtacaatagctattttcctgcccaattcaatgttgttcagatcttccctttgctatgaagactcccccgtttccttcaggcaatcagtcttctggcttggggtacagggcagatagcctttatcctacttatcatgctacatccacttgctaaattttctgctaagaatccttgcaggggaggcctttgtcttgtttttgtatacctcctcttagcgcagtgactgctacacaaaggtgttcaacaaatgaaggaacaaagagatcaatgaaagaagattcaatttcatctttaagatgatcttttttttttaccatatatcattattcatttaagttttaatactgttcaggaattatctattcaggtatccattttactgtatatatttatccattttgaattttggaatgcattcatgagttacttattcaaggcaaatgcattaaattaaaatcaagaaaagggcaagcaagagacagaatgttactcagcccaaacaaattctacttagagatacttcaagcaatgtaatggacagattccgggcacagtaaagtatgtggggtaggagcattcttaaaaccgagtgactcagtctaggaatctgggcattttagaggagcttccatgcagcttgtggttggaagctccttatctcccattagctgatccaagatatgttctcccgctgatcagctcctcaaactcttggctcttagataggcccaggcaaaacctattccttttttcctgtcagaattgagtttgtgcttcattgggtgatcctgccagttaatccctgcttccctaggtgaggcgtgaaggctttcttagtacctaattggcaaagttctctgtggacatgaaaccttactggtctcaggagcaaccataggactggagatgctggactggttgggtgttgtattgatcctccccatatcactaaacaagcccggtttactgctgcctgaaaatcatgcctgtgtctgtcagtaatggcccgagttgcttccttcaactggatctcgttttccacctctaaaatggactccctgatctcacagcccacaaccacttcagaattaggtgagaaacagccagtgttcatggactgctgttcatttggtgtagtagtccatttatgtataaccacaattcacaactcgagaaaataaactaatattgacagggttattcagaagcatttgcccattccaaattctcacaataatccacgagttaggtattattgttacttttttcctggctcatgaaataccactttctcatggttccctgcctctctctcttgacctaccttcccactttcttagtcttcttgtccagctctatttccttcaccttctctttaagcagtgtgtctcttcttctaattctctttccctccataggagatctcatcttcactgttggtatccattaccctccatgctcatgattctttaatcttattttcaatagagatggagagctgtcctttgaagtcagtcctatacttctgcttgcttaagtagcatcaacacataaacgtcctacagcatgtcaaaccataactcaaggtctgctctctctccctcactgccacatcaactttccccattgtcactgccttggctaaggccctcatcatctctcgcgagggtgactctaactagtcacccaggctccagtctcactgcctgctaattcttcatcttctgcttaaaattctgcagtgactttcgattgttgacagttatggtctctaaacttttttgagacactcctatcataaaatatacagtgcgcgtatatatataaatttgtaacactattaatatgttaaatacattatacaaatttgcacaaagtaagtatttttaaagacaaaattcaaacacacattaacagaagttctgggttttttctttctataccctagtgaaccccacttgggagaacactgctctaaataattactaagtgggataataagtgtaacaagtggaatattaaagtggaggaatggtagaggcattgcagatggcagcacagacagtataaaccacaaactggagatcactggccaagcggacccagtccgaacttctcaacatggtacgtgttcttcatatattaatcatgctactctttctgtttagaatgctttttccattctaatttgcagagaacatttcagtcattttttaaaactcaaagcatctgatgtctactctaatggaacctcttctgatgacctcctcagacctgatgcccccacatcccataacttccatctctacttttcttgggatcaaagcttcattatgactttgttgtactttgctgtaactctggcaggcctgaagggtaagtacgctagagtaggccgcagaatataaccttctatttccatactccctctgtcattctcagaaagatgctggcattgtcaccagttacatacctggtggacaggcaggtgtacagtcaatgtttctagacagtagaaatggaccaaggggatattaatctccttccataccaaagaatggtaaagaacattccttaaagggcctgattaaatcatcacaacaatccggtgatatcatcagcaaagggtgccttcataacaatgtgcgagcgaggggagcttgtccttctgaccagggttattgttactgtgtctcctataccacgcagcctttgatgtgtggtaagatgcgtcctctgtctacgttaaaggaagacattctttactcatatctgttggtatgaattatagtattctccatttatgacagatgcacaatgcctgtttccccatagactgtaagcttgagggagaaaccattccttttttatatacgtaggtccggcataggggcctggctcatagtaggagctcaatgaatgccactaaatgaatgaatggatatcacaggtgtggaaaatgatgattgggggtattaaggtaattagctaatatgaactcaggtttatagagccagtaaatgatagagactggccatgaaccagcatctctatcttaatattcaataagaaattggtaattgcatctgggcccatgctttaattattatctatatgctcagttcgcatctctggaatctcaacctgcatatccaactcgctgtctgacacacttccctctggatgtttaacatgcagctcacacttagcttggcaacaaaagacctcttgcttttgcttctgttccccggcaatcttcctcgtatttgacaccaccatctatacagctgctcaaaccaaaactctaggagttactcgtacttcttcttcccctcattccccacacccaacccatctgcaagtcctgctgcctcacatacgcatgccatattggcatctaggactgttcacaaacagagcgatctgtaaaaaacatgaatcaaatcatgtcaccttactgcttacagcctctgtcttcccatcacatttaaaatgcaattcaaactcttcaccagggcttaaaaagccctgtgtctgctactccctgccccctttctcatacctgctatgctcatgccagacaggtctcctttttcatttcaagaacacacaaaacttattttcctacagggtctctgcaccaattgttgcctcagtctggctggcttcttatcaatcagatcttaaatgagatatcttttctttggagaggcgttctctgatggccagctaacacaattgtcactgtatcatatctctcaattttaattctccacctacaagttattgctatgtgatactctccttgttaatttggtttttgtcttatgatctgtcttccccaatgcaactgtaatttcctttagagcagagtactggtctatcttgcactgggtacaggaatacccttacggccatataggccatgccctgtacaactctggggcaacattcacataaatcaggatgtgaaaggcacctcctaaaggtgtgcatgcccagccctagggcccggcacagggtaagcactccaaaattcttaatgaaatgaagttgaaaaaagttaatgtctgcctcatttttggccagcaaacttacatggaaataaatttgatttacatattatctgaagggtcataattataaaatgtccaagtcacagagttccatgtttttctatattaatttgaaacaatgagatctcaaaaagcaatcaaaacagttaacaataattatgatttttcttgagatttactctactactcttgttcctgaattgaataatgtttttacgaaacaccaacattatggcagtagatgatgattttttttttttattgtgtgccactagaaatggttagagaggtgacatcacaggagcgcatttccaaattttgccccaagtctgaaacatctatgtacagtccgggctttaacaggggagcctggaacacactgcagctcttgaactcatggcatttgtctaacgacagctttggcagtaattggtggataagcagtaattggtggataattgaagagcaaaagttttcaaccctcacactccacttctcttgttgtgcctgtcaatgtcactataactggagctatcattttagccaacaagtgaggataacatttacatttcaaaaaattagcttttcaggaaacatttggtgaacacatgcattttgtacattaaatgacatctttgaaaataacgaaataagtaaggtcccacttgaccctagggatctggggtttgttttcgtaataaatactgacttaaggagcaaacttaagatgaatgaatcaccactttaattttaacctttttaaagacctgcgactttcaggtctttccactggaaaatccccttgttttaagatggtgggcctggctgaactactggatctctgttcactgaaggctcttctgtatcacagagccacagttatccagtgaaacgacacacacactcctcgagactagtgcagcattacaactgtccctacaaacaagggaagagacctagatccaggtcacatcattcagcacacttcaatctctgaggacaccattaactcatattcaaatgtgactaatactttcagtattacttgactaatacttgacttcatacctaagcaaaacaaataaaaataaaccagaaaaataacacattttcaaaccctggaagtctaattgtgtattgtttctttgtgatttcttatgatttttcccaacctcccaataaacaaatatccaaaagcactcaagagatcaagacgtaatttaaaataattattaaaacaagtgaaaaagtataattttccttgaattttaatatttgtttcaactaaaaaacattatctcaagttgcacactaacctactgattcaatacttgggggctcaattcagcccatttttattatctaaaactttctacttaatgacaatatttataaaatattttctgtacacaaatattacaatagttcgaaaacagaccattattttcatacagtgctgtgttctcttctccaaataggcatttaaggtctccctgacaccaatttgtgacatttttgtcatgaaaaaagctcaggtgttaaatatctttcatatcatgcaagtaggcatgattccaattagtcctgaatgggagacaaaatgacagtttaataagcttcaatttgccagctctttgaacatttgatgatatcaccattttgcccatcatttcttgcactttggcttcaacctctctgtcacaaaaaattaccacaaatatacaaatgaagacatcagggatgtctcttacagaaccgattgagtcagaaatccaaaaatgacttttccaagacattaaggaagaagagttattcatccaatactttctcagagataatttctgccaatattcctagtaatttcttcgaggcctaggtgaaaaggagaaggaagagtaatatgctaaaaataactcaaggcatatttccttatgtcaatggaaatgacattctgcatgcagaataatgctttttctctggagtatttattttagaaaagaattcatcttaaaagtctttactttgagcaaaatagctctaggatgaagctaacactgcatcaacataaattgtttttgaggagtctagaagaaacacattttctaattatacccttgtatcggtatgaaaaaatctccaggtttgaacttcataatccttgacctcatttctaagtggcttttattggattctgtcatgcaataggatcctcattcaggttcctttaggaaaaaaatactaacaaacattgaactctgagagttaaaatttcattctataaaatgaatggatcatatgtaatattccaaattagtatgtgaatataacaaatatccacagatcataaaccattcacaaaaaaaccataccttaccactactaaatgcaaattcctacgctgtttttatcaagactggtaggcctcattgacctaaaaacttggtggattcttactctgggcactccttcttatttcagcaataatgtgaaaccaaaagtgaacccatttcaaaatgtactcactactcactgttctattctacaaattctgaaacttgttggaagaaactatattccgaagaaaatattaaggattgcatatctctttagagtttaatttacctcaaaagaaagacatagtcatggcttgtggtcttggagaaagagtgaaactaccggctaatacttgatttggatatatgtagtttgaattatgactatcagtattttaaatctattaaggtagtgacaatccaaaattagcaatataatggatttatgcagaataaataaaattcagagacaatgtgctcatacactagcaggcatatggggtagaggactttgctatgagttgggcaatttatttatgctttctgaatctttcttcattggtaaaatgaaaatacatatagtcatcttctgacccaggtaaaaagatcaaaacagagtttctagataggaaatgtcatcctcataaggtattaaagggttgcataagagaatgcaatgcaaaggacccagcagagagcttggcacatggaaagcacaccataaatacttgttgttgttgttgttgttgctgttgctactgctgctgttaaacacatacaaacataaaaactcagtgttgttggaggagctactacatactcaaactggatatcaagcagcattattcaagcattattatgactttgaagcaacattaaatatggcaaatcgctgaaagaaatgcaaactgctatgagaagctcagcaggggagcagagtaccagtgtctctctctcccacaccaggcaaagattcctatataatcctgttccttttttgccatgtccaagtctctccaaaaatctaaaatctttcttggaggaaactatgatagaaagagcactaaattcagattaagaagccctggtttgctagttctgtgaccttaggcaagagattgtccttgaatcataggtttcttatctgtaaatggaatacagttggatgtggtcatctctttagattactttatctgactatcctactgctagatacttacacacctgatataactaaaggcttcatgttggcagaacatatggtatacaatgacttgtggtcccttgcaaccctcccagttctcaccactgcagtgatcatattttactccctatttaaaatctcttccatatttaattacctcttcttcaagaacaattttaatatttctaaagaaatccattaaatataatgagaacaaaagatagatttttaaaacaatcattattagttgacacaaagttactaatgcaaatggaatactttatggtattatttagaaggtttgtctttaaaagaaatgctccctatctaaaagtggaccaaataccacagaatgtagtttccatggtaactgccacattttaaaaatatgcacaggactaaagatacactgtatcttctacaaatggatcattcttagagcaatcatttttcttgcctcatcttgtattttttgctttttaaacaatataattttctccatgatgagggcaaagttaaattgtttataatagtttaatcacaggtatatatacactagttttatgccttcaggatgaaaacaattacagaactttagaattataatagaaaaagaaagctggtgacctacacaaaatgtaagctttacttaaagcagcattttcctatattttctgctaactaaatacttaagaaatagtattattttacttattaatttgtatagtaatatataaataatgcaaatttattattaaattcacatgtaatactaaatagacacaacattattgcatactaatgaaacatgattttcacatcagtgcatccaagccaaaatatgctgagaatttttgccccctctatttggaaaattctgtatgacctatgcttttggtgtcagaaaaacagcatctcccccacacacttttttaaatggcctagttatgaaaaactctatcaatattttgaatatatacagaaagttcctgggctatcttaaatacggcacttagataatatgataaaacttcatctaaagaaaatagagaattgtaatgtgtggttttaccaggagtccaccaaaagtatcttattttctttttacaaaattaaagtgaaataataaaaacttttcccaccaaccttctaatgcctaacattaaactttgtacattgcagtaaagcccacttaatacttaaaacacactctgccctctctaatacaaataactcagtccatcaggggatgagtagcacagcttggtgtgtacacagctggaacaccaggccaccactctgatgtgaccatgtgtgtcactagggagaagaggggaacaaaaaacagggttacattaacagcaacagcttcattaggctgggggaaaaatagagtttacatagcttggtttttccaagcaatcagtccagtttgatccaaagaaacaaaaatatatactacctcaggaccaagcaaatggcattaatggataaatattagtgatgaaatactattttggttatgcaggtaggatatgaatcattttaatacaggtgtaagtatcttttactcttggagtgaattatcatttgattttataatttctttttatagtttttcataacaaattcagagacaagaaaatcagatataagaaagagataataacacttggaaattaatattaggcattaactcctaaataatttctaatctcagctatgtttctaatttctacttcctaaagacactttgtaagtattcctggcacagtgatgaaacaactgtcctagaatttgctaggctgtgacttaaaatatactttcttatgactcataatatctacaaaattatatttcttaaagcactttgttttttgatttgagaataataatattctcaataaattaaaatgaaattttagcacattaaaataaaatctagtaattacattttatgaaagtactaaagaatctaaagtttccccaccagattttatttccaatgttttaacatatggaaaatatcatcaattatattggtcaatgtcctttatattaagtctaatggcataaatttctctcagaactgagaactagaaaaaaaagaactgctatgatttttgtcattacataattagaattatacaattcacagcaaagtttccctctttgctgtggcttccaggcaagcgcagagctaaaatttccgcttaactgtaatattttttcttcagtatagattttctaatgtggtgaatataatttattgcttaattattttcagttattttaagtgtatgtttattataaaatgctgctttagatccttttgatagtagctggcatataaaaaaattaaaatgttttcactagaaaaatgctaccaaagaccaaaagccatgtatgtaggtataacaagaacattcagactatacatattgttaaatttacccttcgagtaatctttaaagaatgatagccaatgttcaagcccctggatgcaggcacacactcagtttataaatggagatttttatcttgggcccaaatttgcaaatgcatggaaaatcaggtaatgcaactgagatacaatttttaaaattaaaattgtcctatcaatatctttccaggaaaacttttttctaagtagaaaagaattattacaaattctacatttcggaatcagtgataagttcagctcttaatgtgaatcactatggcaaaatcaagataatctgtccatttattatgtaaaaattgttcatattagatttatgatgctcagtgtagggaattaagaaaggcatttgggtgccaatgttttgcaagagccactgtactatatgcaaatgctaaattcaatatatttttcagatatggctgatgaccttctgcaaggttgctgcatttaatttgcatgatactgatggtgatgcacaatggctgctggttaccctaggtgcctaaatgtctctactgcaacaggtcacagagtggtcctaagatggtgacgccacctctggggagaatcacaaaggttctatgcaacaatctctacggtagtcacacacaccactcactgtggcaacaaacgtaaaacatcaagcaatctctaaatggttcagggccctaaaaagacaagtaagggatcaaggaacctatgttctatttttcctctaattcaacaggataaactatagaaattctttcattatattatagttcaaaagcaaaataagaattacatgtagaacttccatgtcagaagaagctaagattatatttataaattttcttcatattaaaatatgattgaatcaatgagatcattctccaaaataatttcaataagagagacctggtaaatgagaaatattcgacaatgaggttatgaatttctacaagtcttgatttctaccagtctgaatgctttttcttaaacatatgaccttagatagataccagactgaacatcttgtatgatggtggtaaaatttaatgtgcacattagcaaatttaagtatcaaaatataatatatcctgccattgaaaatcaaagtactataacaaaaatataatatagacaaaataattacctaactgaaccaaataaaatgaggagactacttcattgttcttggtgcatttctatgtcttatcattgctctttaaaacagaaattattagaataacaacctataataattataaaacatattcaccaaaagggagtcccctagttggaacgattcaccttaaggttggtaactatactttataataatgattttctaatcagcatacaatgtactacatatttggaagaagtcaaaaatagattttaaggaaactgtactcatttaagaatctggtggaagggaagagcaaacaaagccatagatttcaaaatagatatttcactggtcctcttttggttaagtatttctaatagccctttttacaaaatggcctccattgctaaactagaatagccacacattaactgaaaatcaaatctctaactgaaaatcaaattaaaaaattatacaatctaatatttaatacgtttgttctgcatcaaactacaacacagtgatttgaaaaagatctattttgaaaattatatgcctactttgtttccttgaaatttgtgaatgaatttagaacttaaaaggtattatacattacattatttagaccacaaccatgaagagatagattttgaaaatttaagacttacctgaaggaaactttgaattaatatcctcagtaaataaccaaagataaatacaaattatgagtattttggtacacatgataagattttttaaagtacagctcattgctaaaactttaaaaaattgtattctctaagaacgactaagtacaacatacacaaaattattttccttttgagcaagaatgcatttagcctgtttccattgcttactggcattcccttgacagcaattccaattagtaaaacgttccaagaaagacacgaaatatgagaaatacaatcctaaattacagcatttgaggaggtcatatagtcctcatacttaatgtttcaataggaagaaattcaattaatagcctcattgtactatccctgtggctttattatacgtaatagaactaaaatttcccttttgttatgattggatgaaccgcaccctatatggcagacacgactcatgcaaaatcacaaaggttccctctaaatttggcctccacttgtatcggcttcccatagcagcccccaaataataggaagttatgcaaattagtgtattttattttatccattatacaattctactatgcaaacaaatcctacactgactcagaacccatatctcttaccatgggaaaacaatggtaaggtttaacatcatatttgaaagagaatatgaactagacaatattcctaataaattgaatggctaagagtcaaaacaccagcatatatttcataaaggctctaatgaggctggtggcaaaaatataatacacgatgatttaacaggaaccacctaagtattctcgtaccatgggcactacaatgactacctttttaggtagcaagccagcgtaaaacaagttgaaaataattgtactgtaaatgtataccattgacaacaaaacctgtgctgtgtatattcatattgcatcagttattctctgaatatagaagacaactcaaggtcaaatgaaaaataaccaataactcctattctttgccttaccacctcccgctgtccactcaaaaaaattaacatcttacttaattagtagtgtgtttatgtttagataatcacaagattgttgaaagacataatataacagaaggtttgttttgtttgaaaattatattatttgcggaggaagaataactacaggaagaagcttgtgtggtgtggttagcatggttagatttcaatgggaaaaggggtatttagacctagtatacaatatgtttttattagaaaagaacattatctttttattgttatcaattgctcttaaatttttctttaatgcaatttcacagcaatctcaagaggatacactaaaggcccttgattatatatactctacagaatgtattgtatcacaaagatacacatccaataagatttcttttttcatctgaaatttataaagataattttccatgctgacagtgcacatttcatccacaagtttgaggagtcaaatgctaccacagctgggggttattctgccaaatggcttccaacagggactacagagatgtgggctaggaggcatgtgtgtgtgcaggaaaaagcaacagacctgatgggaaatagcccttctctggagtcatttttatcaattaccatctgagtgatctaatcaaatatagtctaatgaaaacagcaacactaggaaggaaaagcaaatattaaaacagctgcttgattacctacagagattaaaacaaaaagcaaggagtgaggctgatatatttcatagggatttgctaaggctgaagggaggggtaaggggcagataccttaaaaaaatccatcatgaaaggaactgagacaagatcataaaaaagggggccaagttatagcgcgccatgggatttttaatctggctacctgtggtttctgtagttaaggctttattcatcccaaaacgggggggggggggggtgggggggagaaaaacaaaaaaaaaatcacatttatatgtcagttttgcaaatgatcaaacagcgtgcatcaataagaataataagaaaacattaaacgctgatgactttttaaaaacagatacccgttttatcaaatattattgataattacctgtgcatctcgtttcttgaactcctgaatttgattttcgtgctccatattggcagcgcgaagctgtttttccaggttttcaatttcccgttcatggtctcggactaggctatccttctctgcgttatgctgctgtaataggtgcgtcttctcctgttcatgctccagcttcagctctactatctgattggacaatgaggaggacagttcatcaacagaacatccttgtcgtcatgacaactcatgtacagcttaatttttctctaatttgtccaagttgaaaatttttatttttacatcattattacctcaccctcgaaatactctcatttgttggggtggtggttatgcaaacctcctaatattcaaaatagttgggcatattcagtaaatccttcttcaatctgttgacacaaatgtctgaacattgaaaaaaattatctcgaatgctagtcacttcctccccaagaattcgggtattactgatcagcaatggttataaatggttaatagtacgctttgctttttgcttaaatatacacatgtaaaaagcagcaattaaatcggtcagctttcttcatgatttacaaataaaagatcggagctaaatatgcatctggattcttgtatatacagttgtcttttaaaaaataaaatgataaatttcaaagctctattatctcgttgtcagctacggtataccaacataaacagatgttatgtgttccagaagggcacctgctgtgctgcaagcttgcgccatgatttcataaagagcattctattctcaggatcctttcccagtccactccacactggagactgtgaccttggccagtcttagcctctccccgctagactgaatggcagcccgagaccaaggcctggttgccgcagctttgatactaatcctcccagactgtgcacaatggcaccctacctggcctgcaaactatagccagccaggctgtctttgaagcaggtgatgaataggggacggcaggaagccagcttccccagtgaactccaggccacacagctgctaagaacagtcacttggatttttcttcagttttggtggatttcagggggaaaaactgctgttatctagaatatgttgtgttattttcggcgtgagaatccatcttcaaaaaagctaacagtaggagcctgctccaaatcgatcttgtttcgtgcaatgaatcaccagactaccttatcttaaagctatagcattcatttctccaggcatgcacactgcactaaatttcagaagttttctttttaaatttgaaattcttatcccttatgacaagtcaagaatcaaaacacaaatgaaatttgctttaaaacataggtttcaaaatgttttcttattgtgattaaagagtagcgggtaccattccttctgaaactattccaaacagcggaaaaagtgggactcctccctaattcattttatgaggccagcatcatcctgataccaaaacctggcagagacacgacaagaaaagaaaatttcaggccattttccctgatgaacatcgatgcaaaaattctcaataaaatactggcaaaccgaatccagcagcacatcaaaaagcttatccaccatgatcaagtcggcttcatccctgggatgcaaggctggttcaacatacgcaaatcaataaacgtaatacatcacataaacagaaccaatcacaaaaaacacatgattaactcaatagatgcagaaaaggcctttgataaaattcaacatcccttcatgctaaaaactctcaataaactaggtattgatggaatgtatctcaaaatattaagagctatttatgacaaacccacagccaatatcatactgaatgggcaaaagctggaagcattccctttgaaaaccggcacaagactctcaccactcctattcaacatagtattggaagttctggtcagggcaatcacgcaagagaaacaaataaagggtattcaaatagaaagagagaaagtcaaattgtctctgtttgcagatgacatgattgtatatttggaaaaccccatcgtctcagccccaaatctccttaagctgataagcaacttcagcaaagtctcaggacacaaaatcaatatgcaaaaatcacaagcattcctgtacaccaataatagacaaacagagagccaaatcatgagtgaactcccattcacaattactacaaagagaataaaatacctaggaatccaacttacaagggatgtgaaagacctcttcaaggagaactacaaaccactgctcaaggaaatcagacaggacacaaacaaatggaaaaacattccatgctcatggataagaagaattaatatcgtgaaaatggccatgctgcccgaagtaatttatagattcaatgctatccccatcaagctaccattgactttcttcacagaattagaaaaaactactttaaattttatatggaaccaaaaaagagtctgtataaccaagataatcctaagcaaaaagaacaaagctggaggcatcatgctacctgacttcaaactatactatgaggctacagtaaccagaacagcaaggaactggtaccaaaacagatatataggccaatggaacagaacagaggcatcagaaataatgccacacatctacaatcatctgatctttgacaaacctgacaaaaacgagcaatggagaaaggattctctattaaataaatggtgttgggaaaactggctagccatatgcagaaaaatgaaactggatcccttccttacactttatacaaaaattaactcaagatggattaaagacttaaacgtaagacctaaacccataaaaatcctagaagaaaacctaggcaataccactcaggacagaggcatgggcaaagacttcatgactaaaacaccaaaagcaatggcaacaaaagccaaaattgacaaatgggatctaattaaactaaagagcttctgcacagcaaaagaaactatcatcagagtgaacagacaacatacagaatgggagaaaatttttgcaatctatctatctgagaaagggttaatatccagaatctacaaagaacttagacaaatttacaagaaaaaaaacaaccccatcaaatagtggatgaaggatatgaacagacacttctcaaaaaaagccatttatgcagacaacaaacatatggaaaaaagctcatcatcactggtcattagagaaatgcaaatcaaaaccacaatgagataacatctcatgccagttagaatggtgatcataaaaagtcaggaaacaacagatgctagagaggatgtggagaaacaggaacacttttacactattggtgggagtgtaaattagttcaaccactgtggaagacagtgtggcaattcctcaagaatctagaaacagaaataccatttgacccacaatcccattactgggtatatacccaaaggattttaaatcattctactataaagacacatgcatggctgggtacggtggctcatgcctgtaatcccagcactttgggaggctgaggcaggtggatcacgaggtcaggaggtcaagaccatcttggctaacatggtgaaaccccatctctactaaaaataaaaaaacaaaaacaaaaacaaaattagccaggtgtagtggtggatgcctgtagtcctagctacttgggaggctgacgcgggagaatggcatgaacccggggggcggagcttgcagtgagccaagatagtgccactgcactccagcctgggcaacagggccagactccgtctcaaaaaaaaaaaagaagacacatgcacacttatgtttattgcagcacccttcacaatagcaaagacttgaaactcactcaaatgcccaccaatgatagactagataaagaaaatgtggcacatttacaccatactatgcagccataaaaaatgatgagttcatgtcctttgcacagacatggatgaagttggaaaccatcattctcagcaagttaacataggaacagaaaaccaaacaccccatgttctcactcataagtgggagctgaacaatgagaacacttggacacagggaggggaacatcacacacaggggcctgtcgggggggtaggggactaggggagggatagcattaggagaaatacctaatgtaggtgacgggttgatgggtgcagcaaaccaccatgtcacgtgtatacctatgtaacaaatctgcaggttctgcacatggatcccagaacttaaagtataataataataataataaagagttagaaaatcaacaatgtatttctaaccataaatgtattgttatttagaagaagaaaagtatgcaaactcttgaacatatacacttataacaataatgtataaataataaggcaaaatgtattttgcatctcagaattgtgatgtgttatagtgaatttatatttatttaaaatttaggggttttccccatattattctactattggcaatattcagaaaaaatagtataaacattttctcctaatacatactataccgagtaagaaagttttctttatttaaaataaatgtgtatgctttgttctgtgtctcacagaactatgttaatcccaacaaaagagagatttcatattgtattgctgttatgacattttgctcaggaagctgagtgaatgaatgactgagatggaatatttttagttcttggacatgttatttctactcagcgttataccaacaaggatcattataataaaattataaacttaaatcaaaatcatttaagcatgtaacacactgaagggaaatgggaggtagaaagttctattgagatcttcttgaaagcctcagaaatattgggagaagggatgtgacttaaaattggttaaaagcaaaatattttacaatattctagaatgagaaaagtaaccaaatgagctataattggggcaaaagaattgcagaattttctcccaacagaaaacacatgactagaactagctgtgagatcgttagtaatgatacctccttgttctgtactctagtagtaatgtactttcacagtaactttctaaacagagacatttgaagtttcttatagactcatcaatgatcatgcccatgttcaaatttcactttattcatttttaaaaatcaggaaaaaaaggaaatagcggttatcacatttcaagcataaacataaatagtcataaatgattgttagtttgatattttgccagggcctattgctcatgattctacttaatgaacaaatctcaaggttgccaaagccttttaaatatcattcacttttacctctcctgcttgaacagagaataaggaggataattttcaatttaaaatgcaatagctcaggcttgtctgctaagtccaacactacatggctaacttctggatgtcatgagccctttctggtcttttcctaggcttccgcaccatcagcatcttctagcaagggtgtcttctccagataaatggtagggtccagaggagaaaccctaatgttgggggaatatcttgacgatggtattcataactacaaagaatgtcatcaaggtagatatgtaaataaaaagttttactggtgcctagccccatccatgtaaataaatgttaaaagaatcatctggactttccatttgtcctttacttgtggacacatctcaaaggtaaacacaaagtagcacatcttcttcatgttggactagtagatacttcggttgaccaacaataatgtctaacggagttaatgatgaccaggaggtggtaaattatggacattgtagaggacataaaagcagacagaacccacaaaatgaatattaaatggttaataagccttctaagttaaggggtgtggggcatctggacccataatacatgctacaagggagaactggatgcaccatgatcaaggaccctgcttaattaaggctggctaaggagttccctgtaataaaagagggaaggcttcaagttccataatccaaaagcattgagctatgagacagataacaatactgggtatgtgcccaccctaaacatattaaagaagactggcatgtcttccaggaacactggtagtgtcagccctcatgtgcaagcacctggtggcatatgatagtcctttgagaagctagggttgacggcttggtggttggggttcattgtctagaaaatactgggttgactcataggaaattgtcatttttgaggtcaaaacaggagatgaaaaagggaccggggcagtggctcacgcctgtaatcccaacactttgggaggctgagccgggcggatcatctgaggtcaggagttcaagaccagcctgaccaacaaggagaaacccatctctaccacaaatacaaaattagcctggtgtggtggtgtatgcacgcaatcccagctactcaggaggctgaagcagaagaatcgcttgaacccgggaggtggaggttgcggtgagccaagatcacgccattgcactccagcctgggcaacaagagtaaaactctgtctcaaaaaaaaaaagaaaaagggtcctgctccacccaccatgctactccacaacacatgcagaacttgaaattcaagagtaaagttttgaagttctgaagttcctaaaagcatcggcctccatttcagaacagacgaaatccttctacagcttgatgatgacgtcttcattccaattgaactttcatgtaagtgcctaagggcaagagcacattctaggtcccaagaaagaccaagatggagccactggacatacaagtccctagggatcttgggatatatattttaagtcctggtaactgttttacagtgaaattagtgctagcaaatatggcctgaaccactttcaataatcatttaaagaaatagaaaaggagatggaaaaagtcatttcttctcaatatacaatatgtggaagactaatataccccaataacataacttaatgtcaggaatgccagtgctagaaacataaatcatagaaggatgtaccacaacacattgaaaaggggaaatgatggtataaaatactaaccaaaataatcttgaaggtaatcaaattacaaactttatattctacatagccctggtgtaaaaacgggttatagctagagaaagtagggagagtggttctccatattctctggctagaaaaggaggaagagagggagtcacagttagatgccctggggttatatttgtcctacaactcaatgataattgctctcccttaagtgaatagaaatatgaaagtttaagaatttggaaggacttagaggctagctaatacaatgttaatcttaatctaaaaaccttccctataaaaccctgatagttggtcattcagctgctgctggaatgattttaccaacaggagaataaccatattccaagagaaaccaatgcctcatactgaacatacttggcactggaaattctgggtaaagataatagggaaaactgaaaattgtgaaaagaacaaaaacaaacattaaatacagaacatgagaacattcactggcagtgaacaaacaaggaaagaagaataataacttggccacaaatttcaaaacaaggtagccaaggaaagaaagagaagattctgacatggtttggtgagacatactcttttgtccctataccctagaagtagaactggtaagttgaaattatgctgaggattattttccagtatcccagttttagagaaaaatgaactgaagatgtatcattcacttttcccccttctgcctgggtggaagaataggaggacaatttcaatggagtaaaaatggctactagagagagatgaatcaagttaggaaagtaggaaacttggactgattctctctgatagaatataggaaggagttagagttcacagaaaaaagaaaacactctctaatacacagaaaaaccccagtgtaagacattaataaattgttaaaagacagagccagtatcagtttctctgacagaagttgttcagaactgcaactaagctctttttctccatccctatcacgatctcataaaaaagtaaaggcaatgaaatacctgtgccttcatactgaaattcagaggaggactgacaggctgaaaagtagtcaaagagaattcatgaatattatatcagtccatttaacagatttggacacaggtgcccacgttaagcccaagcaagatgagggagaaaagtatctgaaaactagagaaacattaattacattaggaaaaaggtgaacttagtgacaaagaagaggaaaagaagaaagtaaggaagaggcccatcattaaaaaccaaaaacaattgtaagagaacttaataagaacatgagtgtaatgaaagaataatgcaaggataacaagataaaacaacagaattaaccaaggacccaaataactccatcacaaaattgattctaaatcagaaacaatgagttgaataaacatggtgaaaaatcaaatcattgacatagataaagggtttgaggtaatcataataaaggtccaggaaaaagacaaagagaagctaaagtaggaaacgtgaaaagaaaatccatgtaaacacagaccgtggtatccgaaaatttccctaaaatgaatgaagagataaatgtgtatatcaaaaagacacactgtagaccaagaaagatagattccaattgaggaaaagaaacgtgaaagaaactcaaggactgtagtccccaaaccactcttgaaacaaaaaaacacttggggataaatttcaagcaagagatgaccagagaagctgtttaagaccaatgtttgcaccaaaaggcaatggatgatgtgtacaaagtgtcaggggaagaaaggatgatcaaaaaattttatgcccagctaaggtatccttcacaaataagagaacacatagtgatgctcaagcatgcaaaaatacagtgaatacaactataagcccttcttggaaaagctacttgatgaaatctcagtagtcaataatagatcaaaataagaactcaggtatgaagttgtgcaaaaatcctggtggtgagcacataattgatttaaataaaaagctaagtttatataactgtgagaattatggttatggaacaaaatataaatgttataaacttcaacaatgtataaataatactatggttgacaaaatagactggtataagtaggtggaaggaaatatgggcagtttaatttttctctaataaggagttaactaatgccctcaaaattgaaccacaaaatttaaaaattactctaacttcaatgtatttttaatttctaacattctaaaaataatctcttatgtggttaaaaaaatgtttttctaaattttagaaatctttccatttccactgggcacagtggctcacccctgttatctcaacactttgggaggccgaggtgagatgatcacttgagcccaggagttcaagatcagcctaggcaatgtatcaagaccctatctctataaaaaataaataaaaaagaaaaaatgagagaaatctttccgtttcccttgtttcttcaaataatttcacatataatttaatattttaattaaaagtggcaaatgtagcatggtcctgtttctagaaaattgtttttgtctatatatctacttatccttctatttatcaatctctcatagaaatttctggaataatgctcacctaagattaacagcagtcgtttccggaaggtaagatttgggtaaaatttttgttttcttctttgtgtgcaggaccatgtcaaatgccagtagctcccttcggggggaatatttacttctggtggcagtacaagactcttaaacaagggatgtggtctctcttaaaacaaacgggttctgggtctgcgaaccaactcagatcgggaaacttggtagaggactatgattttccaccctaagtggaaaactgtttcagtttcactcatcagtcttggacattttcttgatgttgtacaagccaagtagtattcccactggctctctatcttatctctcagaacacagctcattatcaccacagatccctgcagggtaagacacctgaagggcctgtctagccttactatccagtagagtaatcgtgtctaccttccatctatccaagtgccccatgtagtgcctgccattctggaacccaactttcctgttgaaaggaggcagctcagttccatagcagcatctcctactgtcggccccggaatacagaggaaaccaccatggaggtggctcagtgctatcagtgcccctcccaccagtgcaccttagcaccctagtaaaggccatatcctctaggccctcccatgcactggcttctctggcctaaagcaacaaaaccactctcatattctcacttttctgatactttgacccttcctccatagtaagccaaggcagttctgccatggctgaagtagcatggaagtaagtggcagaaaaactactgcctggtaaaaatcacaaacaattatcaacatgccacattttttaaaaataaagatgaaggacagttcaaacattgtaaactgtatccaaaattatattgatcatcaaattaatagttcaaggggcacattgctttaaaggattggccattaatagacagatttttctacagggcttgccaggtaacactttcctctcacgttctactcaagggctctctgtggaaaacctttgcttctaggttgtaaaatttagcactagttttattaggttggtgcaaaagtaattgtggaagtaattgttgtgtttgccattactttcaatggcaaaacccacaactacttttgcaccaacctaatatataggtcattagactcatgatgttaagatgcatactaagaaacaggcaacaggtacatcaggccctggtatttttcatgcaatgagatatatatttaacatcatcaggttatgtctctgaaaaatttgcatctgcaaaattgcacacttgaaatgtcaaaataagttactaaattttttagagctgcagaaattttacgctaatggggcagtctaccgcaaaggtagtagtttcacagactgattttatatcctcactaaaagatgttggaatctttctttttagtcacagttatatgatataaaatgtgctattggatacttcactatatgagaaaagctcccttaaagataaaataaggacatatacaatcttctctgagtccttggagtcagagtaaagatacattttagcacagaaaatactacaatctggtcttactttctgaacactttaatagaaataggcacaaaaaaattgtaaaaagcaggcagtgtgtcaagaacagaaatagaatgtgtcatttggggatggccatgtggctcccagattagatgtttgctacatccatgaaatctgtcaatcaacagttcagtttacgcatggaagttctccttatttaaaagtttaatgttgctgtgataaccgctgttagagatggtaccagggcctgccagcatacactgcttctttattccttttcctctccagccaaccatcaacagccaggactactgcctgctgaagctcccgaagctcatgatacagggagagcagaaggctggaaacacagctgtgattagcaagctgatagatgaagcaaggctggaagcaggcgctatctcctgtggttatcttcccatttaacacttcaaaacacttctccagcacctgtaggtgatgagtgacaattatcctgagtttttaaaactttttgaaaaatgagctattactttctgtggttttatctgccagatctcagttgaaactcaggaagaagccagatagtcaaatgcttcaaaagggtttttttttcatggttcaataatggacaactcaagccacacaaattgagaaaattaactaaatttaattaagattaattaactaattaactaaattaatgaactccatatagatggagttcaaaatttttagaaaaaaacatgtcttaactgcatattttaattcattttactttatgtgtttctctacaacacattcagttctcaatgagatgtctgtgtcttaatctagtatgttactgcttttgaatgaacatgaaatataaaaatcatgtaagtttgccagctacagttcgtaatttagaaggacaaataggtcaacctggttataaactcttccaatatatagcactgtgtctttactttctttttattttccttatcttgcctaccacaatgcttcgtaaattattcatcattttgaatgaaacaaggtggcattcgaaaaacagaattacaagtaggtggaagacagctgcttcatcttccccatcaccaaattggctggtccacctgcaaagaccctgccttacctatggcttgaacgcatggctggccttgcagctacctaaggcgagtcccttcatctgtacactggattccatcctttcttgccaaattaagcatgctgctcttgaaattatcccatcactctctgcatcatcaatattttcttctctagtggatcagtctcatcaataagcaaacatgtttttagcttatctcattttaaaaaaactttcctttgaccacacacgtccctctagataccactcatttctctgctcccttttctttcaaaattcctcaaaacggctgctcacaacgcattgtctgtccacccacataattcagacattggttcccacattctactgaaaccagtcttgttgaggtggctaaagacctcgccatgcagcagtcagttctcagtccccatctaacttcccttcttggcaacacctgaaacaagtggttactcacttcctccttcctgaaacactgcacacggcttatgggaaatcccaccttcttagaccttccttttacctcactggttgttccttctcagtctcttttgctgcttcctccacctcttcctcatatgtaagtgttggcagcccctagactcagtcctggaagttcctttctcttctctctactcatgtatcagtgtctgtcaccaccatccacctggttgctcagttgggaaacttttaagtcacattttagcccactctttaccttacattctatttcacaaccattgacaagtcctgcctgcaaaatagatcccaaatctgactactccctgtctcccccaccactcccaccctagtcccagcccggtaacctctaaccagcccactgcaatcatctcctaactaggtcccctgcatcctctcctgcctccatcgtaatcaaagctccacacagcaactggagagatctttcaaaaatgcaaactaggccgggtgcagtagctcacgcctgtaatcccagcactttgggaggctgaggtgggtggatcatgaggtcaggagttcgagaccagcctggtcaacatagtgaaaccctgtctctgctaaaaatacaataaaaaattagccaggcgtggtggtgggtgcctgtagtctcagttacttgggaggctgaggcaggaaaatcgcttgaacccaggaggcggaggctgcagtgagctgagatcacaccactgcactccagcctgggtgacagagtgagactcaaactcaaaaaaaaaaaaaaaaaaaaagagaaaagcaaaccagatcttgctcaaatgctccagtggcttctcaacacactcagaataaaatccaatctcccaccatggtccataggatgtgacaaaatctaccctgtactgtactttggctcctaccactctcttccaagttcactccattccagctacaaactaacccatctcatggctgttgcaaccatccacctggaatgttctttccttacctcaggtttttgtatggtttcctccttcacttcatccaggtcttaatttgaatatcatttcagtagagtccttcactaacaatcttatctacaataacaccttgtataaaataataaccatttataaagtagccctttcactcacaaacactttagcttgctctatttttcttcacaacagttatcattacctcaccctaccttaaattatgttttgaaaaagagtgtgtgtgtgtgtgtgtgtgtgtgtgtgtgtgtgtgtgtgtatgtgtggtaggagtagtggtggtgggtagtggtagtgtttttctcttccatcacaagggtaaagactctatattttgttcactgttatatcccaagcacttggaagagtgtttagcacatagtaattcaataaacatgtgtgaaataatgaatgattgagaaggcattagttccactttatatttttaatgtacttaaagaaggaataatgagttagtccatatcactatccaggaaaacagcttctttttttttttttgaaatgggtgggtggggtcttgctctgtcacccaggctagatggagtgcagtggtgctatcaaagctcactgtaaccttgaactcccaggctcaaacaaccctcgcaccttagcctctaaaatagcttggaacacaggtgcaagccaccatgccagtctaattttttttttttaatagagatgggggcctcactacgttgcccaggctggtctctcactcctagctccaagcaatcctccctcctgggcctcctgagttactggaaatacaggcataagccactgcacccagcccatctttgctcttttaatattcactctagctaaaggtgccacttgttttaacctagatgagaacagctccaggccaaaagaaaaaaaaagaggaagagaaggctcttcaattgcctttcactaaatatcagcaccctttctatgactctaggctccgaccactggacctggacacaggggcccaggctctatagcctcacagcctggggctctgagtctggcagcctaatggctgggaatctggtactttgccattgcctgcaggaccaatctgtgacttgtggtgtagctgcattccctgaatttggtgcttattcaaagaagtaagttgaaaggaagcatcattagatcaaggattgcatttgtcttgatcaccactgaggaccacaggggctgatatgtagctggggttcaaaaatgtattaggaattggaagaggaaggtcaagcaaaaaaagactttcaaaaagagtatgataaggtaagcaagaataaaagagagtaagagcagcatactggatgtaccataaatcatacatatctagaaatcaataagtcatatggtaatccatttggaagggattttagggagccccacaaatccatggtcatttaccacattacctcaataccgaagagaaagtttacgaagtctttctacttggatcagtcttgctatcacccaaataattttaaacaattcccacttttatttgctctcctgtccatgtaattcctccagtctcagcaaatgattttgccgcctatctgacaaagaaaaacctcagtaataagaatgtcttcatctgccttttgcagatccacaaacttctacacacctggccttcccttcttttctcacgaggcacaggagacagacctggccatcatccaaggccagcagctccccacgtgatgtggggagctgcccagtatctccaccttcttgggaacatacactagtgagtgtcttcccctttcctccctctcttcctttccaccatctccttttccagtgtagactaaatagtctcatttaaaagaaacctggctgggcgcggtggctcacgcctgtaatcctagcactttgagaggccaaggcaggtggattgcctgagctcaggagttcaagaccagtctgggcaacacgatgaaaccctgtctctactaaaatacaagaaaaaattagccaggcgtggtggcgtgtgcctgtagtcccagctacttgggaggctgaggcaggagaattgcttgaacctgggaggtggaggttgcagtgagccgagattgcgccactgcactccagcctgagtgacagagcaagactctgtctcaaaaaaaaaaaaaaattaaaattaaaataaaagaagcctaagcttgaaggttataccacctagctaagtaatgactagaatatttgcaaaggacaaggattgggaatcacgtgctatctgctttttaaatatcccaactgaccttcacttaaaatttcctacttgcttatcttgcagaatttgttttgtctttgctactgtgtttgctaacaaaatattttaagttttaaataatggcagcttgtaagaagttggcccttcagtgttttttgttttttgttttttttgtaatcattgacaataagcacttattctttctggagaagctggccacttgtttatctgctgaactacatttctccttcaaggctttgtagtggaaagcaaagatataaaacacaagattaaagaatgatctcatggagttgccaaagaaatctctatagtccaggaagtcctagcatgcctggttggttgtttgtttccaacttgaatgaggtttgtgaaaagacaattagaattgtctttttgttccaatgggttatacaggaaagaaacaggaaatcttgatgaaagcttgggctttacaggatatttgtgtgagcatttagcccatgtgtttgatgtttttctttccacatctgcacactttatgcctggattttggctaagatactttaaaatactacttcgctgttttcacttcattacagttcctggcacggtgctttctgtaagagaggggctcaaaaattaaaactggagaaggaaactgaggcccagaggcacaagtccattcattccctctgaatgtcagtcagttccctcgttataaaatgtgaggattagaccggataagtgcttttaaaacttttccaccaaagtactctcagcagcagtgaaaatgaatagcacccccctgggggatctgagggcatagcctgaagcagcctctgcaagctggaagtttctttgaaatgtcctattttgtcttcttcatgagaactttgcattttacaaaacaggaaagtctatgtttgttttaataggaatgttacctcaatagtaaaactacgttgctttcccacaatcgaactgagtggatgcaacactccaggaagcatgtacgcagcctcaggaacccctggcacttgctcacactcccccggggatcaccttacctgagttggagaagcaagggcccagatgctcggcgtctaaatcccctcctgatgtgaaatgctatcatcataacactgacaattttaccttttagagaaaagtaaaacaaaataatagaaaaatattcacacttccatttgaatggcaactgagaaagtaggcaagagtcctgatacagggaaatccagccagacaggtacctaaatgaatgagtcagcggtggaatcagagaagtcggtctgtcaagaggggctgggaatctaatcaggcagatgaacagaaagtcccagaatcttggttttggaagagaccactgcagtaagacagcccccggaaggcacagtatccctccagaatactccaaaaacacaccgcaacccactcacactggaaacttactttctcacaagaaaaactgttgcacatttgaaggaggagttctttagaaaagaactaccttgaaacaattcaaaatattcctcatggtaccatgtatgtatgggttcaatttctgccccctggaactccgcgggagtgcatttagagtgggggtcaagggcaggcctcaggttcaggttccgaatccaccacctatgaactctgtgggaccctgggccatttactcaaatggatgtacttcagtttctacaactagaagatgaaaacaataaacagtgtagctacctcacaagatttctgtgagtcaggtgcagtggctcacgcctgtaatcccagcactttgggaggcagaggcaggtggatcacctgacatcaggagttcgagaccaacctagccaacatggtgaaaccctgtctctactaaaaatacaaaaattagccaggagtggtggcgtaccacgtgtaatcccagctacttgggaggctgaggcagaagaatcacttgaacgtgggtggcagaggttgcagtgagccgagattgcaccactggcactccagcctgggtgacagaccaggactctgtctaaaaacaaacaaacaaaatatatatatatatatatatatatatatatatatatatatataattataatatataatatgcattatacatatattttatatatatatattactgtgaagatggggagtggctgaatatgtgtaaagcaagcagagtagtgcctggtccagggtagatcctaataactgtgggcttttaggatttttatcacacagaccaagcccagtactccctgaaattcagaccttaaatttacaaacagagagatatgcaatcctccctttaaatattcccctctgacatagttccagacctttctacactctgaaaactcttctctgaacatgttcgagtttgtcagtggcctgcttaaaatgtggtgaccaaaatcgacctattccttatgtgacctgaaatgtaaacaatagctgggaccatatctgccagccctcttgtcccctgtgtcccaggcaccacactccccttatctctgaggctttctgtcttccttctacttttgcaactgattttctaaaccaaaccatggcattttatattcaacctcaataaatgtaatcttcttaattccagccagcttaaagctgcagaaaactcattttttttaatcctacatattaactattcctcagaactctaagcattgggaaactttaaactttttttttttaatcccttatcatcctcgactgactgagagacacagaaatctcactttaggttaacactaatcattcagagatggccctttgaactatcacttaaccacataaaggtaccaatattcaaaccatatttccccatactgccttcatgtaggcaccgtcagacggctccacgaaagccagatatattacatctactcctatttccttatctaccagcctggctgccctgttcaaagaaggaaatgagcttagtttaatcggcttcattcttagtgtactcatgctggcttgtagagctcactactgtatgcctatcgtttgtcatgataaacttccacaggaaaaaatcctaacaatttggagtggtcaggggaaacactgttacagttaacagaatattctgctgaaaaaaaaaagctaactaaaaaagtttgtatattgtcacatcaataaatattctcctaaaatgtactagctcatactcctgccttcatctttccttagtgaactaccacctgggatcttcattctcagcattgattctaatgtatagacctctagatatagaaagaataaaaacaggtgaaatctgcacccacctgaggtacgcttgtgtgtgtttttacattcctgttatatactacatttgtatcatctcttttcatgaaaaaaagaaagaaaaatggatgcaatggtgtatggcttccattaatagtatcaattctttaaagaatttatcggtatcccttattgtgttagtattatttttgatcaatacaaagacaaaactttgatagattttaaaatctatcattctgagaaaagcctttgaagtttacatgcttccagacaaatttatatattttttttacattaaaaaagtgaaactgtcacaatgtggataatagggggtatagaaaaaaagaattcaccatgattccatcctctaaaaaataactaggatttttgagattaaggataattgggtcagagggtgtaagcgtttttcatgactcttggtagaatctgccaaaatcctttccaaaaagcctgtaatgccactagcatgtataaaagtaccaatttcactaaacttttaccgactttagatggcacatcatggttaattctaatttgcatttttattaacaccaagagtaacgatgtttctacatggctgttcacttaattcatttcttatctctctctttcctttgccaggtcacttattgggacattaatgattttcttatggtttatgctaattactatatttaatctgctaattatttttatatattatacatttattaattttataaggagagttactctttgcctaagatatctgcttcaattatttcttcaattacttttttaactcaaaatactttttatttagtcaaatgcatttcaattttccttggcgtttttttcttattgtgtctgactttcaaagtcagtggtgtgccaaaacaattacaaaataaatgcagatcaggtgctgacatcatttggccacacttggttataaatttgtgacccatgtgattatcatcaaaatgagaatataattttaaaactcccacagagaactctgcaacatcttacactcatcctgtagtatcataacctctgactagcatttgtgttacataaagagctttaaatttggttttcccttctcccctgttccttcctcagtttacttagaggaactgacatttttcttatttttcttagtgcttctaatattgtttttaatacaaaattacctcaattatactttgtaactatagcataataaaaagtaacattcattgcccttccttaatatttttatttacatttgattattacctctgtttccctcttaccaccccttcctccccaattccagcctccaattcttcatctagttttctaaacctagtttctgaaaccagtttccaagcaacttcccccatcactaaagttgtggaaaacatcctccatggcacttcagataacagtgtatttcaggggaaatacctatttttaatttagcatgtgtcagaacgactttcagttgccatcccatattaatcggaaattaactacttcatttttatataaaaccatttttttaaaaaaaagaatctgatagaataactccattgcaccggcttttgcagttagaaagtctgaagttatccatactttggcactgttgaaaatgatctgtcagctctatcgtctaccttttcttctcttttaggcttttcatttgttggtcattttttacattgcatataaattgtctgaatttattttctatttcattaatccaaatttattacccacttaaaatgttacagaatataatatagaccaggcacggtggctcaagcctgtaatcccagcactttgggaggctaaggcaggaggactgctcaagccctggagttcaaggttgcagtgagccatgatcatgccactgcactcctgcctgggagacagagcaagaccccatctctaagaaaaaatatatataatataaatgctccaaaatattattccattttaatgtttcttagcattcataattttaatgttttacttatccaagtaatgcataacatatgatcattatgaaatttgaagtaaaaaagttttatttagagcatacaatgaaagtctcagttcatcataaccctaacccataataccaggccaattccatagtcatgtataatcttacagaattttttcactgaatttacatatctaactttgagacacatatgttttaattttacttcaatgggatcataatatacaaagtgttctaaaaagcgctttattcccctcaccaatatgtcttagaaatctgcatatgttggcaccttcagatttatattaatctttttaataagtatatagtattccacagtaggtatttagcattatttatttatttatttttgagacagagtctcgctctgtcacccaggctggagtgcagtggtgcgattttggctcactgcagactccacctcccaggttcacaccattctcctgcctcagcctctcgagtagctgggaccacaggcgcccaccaccatgcccggctaattttttgcatttttagtagagacggggtttcgccatgttagccaggatggtctcgatctcctaacctcgtgatccgcctgcctcggcctcccaaagtgctgggattacaggcatgagccaccgtgcccggccagcataatttatttaatcattcattttattcataacttttttcagtattacaaataatcctcccgaaacatatgtgaacatgcatttttttgcacatgtataagtatttctataggataggttctaagaaataaaattttgggattaaaatctatatgaattagtttttttggaacaatagaacatatatatcctacatatgaatatgtatatatagagtgtacatattcacatgtgcatatgtgtctgcatacatgcacacatgatttttaaaaataaaatggtaaagatcatcttctaataaaaagtaacaggtccttgccccatcccactcctgtactggtggcaactcttttaaaacatgtctgtgctcctttctgtggtgattacttccctacctctacaaaatatgctacatagctctttcttaatttaccaaagctagacattccttataggccttctactaggacaaatggggatttagctcatttacactcccttgctgctctctcccactcctgtcaccattttactagttactccactcctctcacttcctccagtggtcaaccctgtaattaggaatatactaaagcctctgtgttttgtttcatgatacgggcagctgctcaaatccacacttcatgataatacctcagtactctcacccttcccctcccagcccctccatccctttcttccacttccatacctacaccgtcttaacctttactgttacaatagcaaggctggtgatatggtttggctgtgtccccacccaaatctcaccttgaattgtaataatccccacgtgtgaagggcgggaccaggtggagataattaaatcatgggggcagcttccccccgtactatactcatggtagtaaataagtctcacaagatccgacggttttataaatgggagttcccctgcacaagctctcttgcctgccaccacataaaaggtgattttgcttctccttctgccatgattgtgaggccccctcagccatgtggaactgtgagtccattaaacctctttcctttataaattacccagtcttgggtatgtctttattagcagcgtgagaacagactaatacagttggtaacatctatgtcctgttctgtaaccctaagctagtttttaaagctgaaaacaataaatgtcatctaattattatgtctatgtatatactgttcactgatgaatattttgtctgctaagactacatttccttttctactggtccagcatcataacgcctgtgctgcttgatgaagaatgtgcctttaaaatccagttccagcattttctacgtttttacattttctaagtttgcaatcgtagtcagcatggtaaattgttttacgctaaccccatttgatggtcttctctgtgatactccttccaggcggaggattacaccagggaggccatgtttgctttggccaataaaatgtgagtaaacttacttctgagtcaattttagaagacagcaaatgctcaaaatatttccttttccatttcccatagcaatgttccagatagttcattctaaaaacgactcaagatgacatgacatgggtcagagctgcagtcaatcctcaaaggacacgtgacataagtatgaaataagccttttttgttctaagccactgaggtttaggatcatgtttaccaaagcaaaaccaagctaaaaattaatggtaatcttaagtattctgggaataagcagaaatatatttttaaaagaagaaaataaaactttgtattactaagtaagaggcagagcactgacgacaaaatctcaactccttacacaaaccggtcctaacctccctctttcccttcatctcctacagcaggaacctttctccccatactctggctaacctggtcttcatcatcatttattttccttgaacacttccagcttgctctcttctcaggatttttgaacgtgcagttccctcagactggaatactattcctccagagctcatggctggctccttcctagtttttagaactcagcacaaatgtcagggaaaccctgatcagttattcaaggctataatctccttcccaccctccacctggcaaaggctataaaggtaccatcttttcttcttcataagtcactcttcaggccgggtgtggtggctcacacctgtaatcacagcattttgggaggctgaggtgggcagatcacctgaaatcaggagttcaaaaccagcctggccaacatggtgaaaccctgtctctactaaaattacaaaatttagccggacgtggtggcgtgtgcctgtaatcccagctacttgggaggctgaggcagaagaatcgcttgaacccgagaggtggcggttgcagtgaaccaagatggcgccattgcactccagcctgggtgagagagtgagactccttctcaaataataataataataataataataactcactcttcaaaattatttcactttttaatttgtagactgatgactcatcgaaaagcaagctccatgagagaggaggcatgttctctctgttgctgttctccctcatgccagggacagcacctggcacatagtaagtactcaaccctatttctcaaataaatggaggtttaactagtgctctgacaggatagaagaatgactgatattgttaggatacttgttcccacccaaatctcatgttgaaatgtaatccccagtgttggaggtgcggccttgtgggaggtgtttggatcatgggggcggatccgtcatgaatggcttgggccatccccttggtgataagtgagctctcactctgagtttgagtgacctggtcatttaaaagtgtacggcacctcctcgcttctctctctctctctctcactggttcacttgctggttcctgcttttgccatgtaaggtgcctgcttctgcttccttctgccatgattgggagcttcttgaggcctctccagaaacagaggccactatgctttctgcacaacctgcagaactgtgagccaatcaaatctcttttcttataaactacccagtctcatcaattataatcgatgtttcaatcaaacattcagataaaacaaacagtcagaataaacttcagtggagtgttaaaattctgtttatagattttattgaaacaaacattattttaaatatattggtaacaacagctcttagtaatattttcattatgcagatattttgtgatagtgatttttaaaagataaatcatatatgtattttaaaaatttaatggcagcatcaaaatgaaagaccaacctgttgttcataccgctgtctgatgtcctccagttgccataaaaactcctttgattgtttctcacgaagagatttggatctagttagatctgcctccactttttccatctataaaatttaaaaatcaaatattaattttttaaacaaacaattgtgttccatgtttttgtaatttgtccatttgtttaaatgacagattttaagcacctcaccaataataatgatgaatttaaatgtattaaaataatgagacatttatcaattcattttaatatattttaattatttaaggagggaaattaaaattggtatataattgactaaattctaaaattacaacaataatgcagtgaaaatataatttaaggcattctaatatttattgaacaaaatttaattaagcccttggtatgtgctgaatgagataaaatatttccaaatcatatctctaataagagacatatcttgaatatataaagaactcttatagcccaataataaatggataattaaactcaattttaaagtgggcaaagagcctgaatagatatttctccaaaaagatatacaaaaggccaaaaagcatttgaaaagatgctcaacatcactgtctttaagcaactacaaattaaaacaagaatgacatatcacttcatgccccaaagaatagcaataataaaaaaggacaaatagtaacaagtattggtaaagacgtagagaagtcagaaccttcaacactgctgctgggaatataaaatggtatagacatgctggaatacagtctgtctgacaattcctcaaaacattaaatagagttacatgtgtcccagtagttccactccaaggtaagaaatgagaacatacatccacaaaaaactttgtctacaaatgtttatagtagcattattcataacatccaaaaagaggaaaccacccaaatatccatcagttgataaatgaataaacaaaacgtggtatattcttacagtagaatattattcaatcataaaaaggaaagaagtattaatacatgtactctgggaggctgaggcaggaggatcgcttgagcccaggagtcggagaccagtgtaggcaacatagtgagactgtgtctctacaaaaaagaaaaaaaattagccgagcgtggtggcatgggcctacagtctcagctattcgagaggctaaggcagcaggatcgcttaagccccagaggttgtagctgcagtgagccatgactgcaccactgcattccagcctgggaaaaagagtaagatcctgtctcaaaacaaaaattaattataaatagaaaaaaaactaacacatgttataacatggatgagccttgacagcattaagctaagtgtcacaacagaccacatactgtaggattccatttatattaaatttccagaataggcaaatccatagaaacagaaaacagattagtggttgcctagggtgagatggtgatctgggacggtaactgttaaagggtatggtgtttctttgggggaagatgaacattttctaaaattgattgtgatgatgtttgcataacatcctgaatacattttttaaaaccactgaattgtacacatacgagtgaattgttggtatgtgaattttatctcaacaaagctgttattaaaaaagaaagcggaaaaaggaaaagtcaaagattccaccacacccatgaggcctcacataatccaatcccagtgacctctcacagctcatctctactgctctatcccactaccaccaccacagtccacctacctgctgcccaggcctataatgtgtcagaagtgctctcaccttgtgggcaggaggttctgcctgatattcacacagtttctttctcaaagtattgaggctttgtttagcatcacctttgtactgagaccttctagaccactcaattttaaattgtacattgcaattccccagccactaagtccacctagtccccctatccctgcttagctacccttttgttccacaggatatatcaccttcagattcactatataatctacatcttcattagggctgtttgtaatgtctctcctgcagtgtaatgtcaccccatgttcactgtcgtcagtgaaatagtatcaacgatttatcacagtgcctggcacatacagggaatcaataaatactaatcaaatgaaaacaaagattgcacagtgtacccaacttggttcaagacttgctgaatttacaatttccaacgtttagttccaaattctttaaaacacacacaaaataaataaaagcatgttggatctaactttttctatcactttgtccatgttatgatcagatgcaatgagaaagagatgttcttacagtcatgaaaaagctctccatgtcaacaacatgaaaatggtgccttttattcaaagcaatgcagtattttacttgtctttaaacccctgcacatttgggtataacttaagacaatattttttgtctgaggcaattaccagctaacgtggcaaccattctaccactggctactttatattacttattattctgcttcactggtatatggaactacttgtactttgttcagcttgtacacaatgccttctttcaggttaccttttggtaagcactaagattagttaagacacgaatattggaggaaatgaactatgaaaaatgcttctttcacagtttttcacaatatatttgaaaaaaacatttcaatgcatttattcagacatgattagactttaaggttctaggaacaaagatgttcagtgaaaggcaacgagtttcactgcatgagaacaaaatgcatattaccacccactactgtgtctaacaccacattccagtttctggttcttacattgaagtttgaatgccctctagattatagcatgctatttagcacccaagtatttctttgtaaataccaaggattgcaatcccaaaaatattaagtcatcagtgtaaaattcaattagagttctaagattactgattcatagataattagtattgtggtcaagaataaatttaaggaatgattaaaggaagcacagtcaagcacactttggttttttgtttctaactcaagactttggtttcaagactctctttctttcagtgcttttcatattggacctcaagtgagattctccttaatctgtcctcggcaatccagactccagtacccttgatattttccaagcaagccatggctgttcttgactctagggccttttgcccatcatactatcagtaggtcttttcatttttttttttcatccagtcagtcttttcaaagttgactcaggttttccttcttctctaaggtgttctttaatcccactaactgaataaatgccttccttctctctatgctctaggacttaacatctttattcttctagcacattgtgtatttctctataaaatggaaatgtttcaaatatgtaagctttgtttagtaatgcagataatgagcccacaaataaaagaactatggcaagtctttcttttgtatatttattaaatagctgccatggtatgcgaagtaaagatgtattaaattcttaaggatgaggaggagggacatcagcaagatggtagaataaaagttccacagctccagtctatctcatagaaatccaactagcaacaattcacagacaagaaaaccttcgtgaatattccagaacataggagtgaggctgacacatgctcttggattacagaactaacaaaagtcacattacaaaaataatagaaatggtttcacgttgactgtatcatctctcccacaaaccaccatagtgccacacagagaggattcccctgggcccatggtttctacagtgggaaagaggtgaacatccagctttcccagcattccaagatgtttggcaggaggcccacttctgcctcgccttaaaaggaacattgggagtattagcagggctagaacatctgagatcagctataaacaatgaagggaaaatggagctcacagcaacctctgcattctggccagtggaggcacccaaccagagagaacaacaaatagcatcactgagcaggaagcacagttgacagatctgccaagctcaagtccctagccagatttgccacccagcctcagagcttggcatacttccccaggctcagaggcaagcccagatccctgcatatctgcagagcagagcatgtagtccaatacaatcttagcagtgattgcccctgtctagtgttggagcccagcctgaggtgcaggcagggagccaagcccaaaactacacataattgtgggcatagcatctagctttgcccatctgagtggctggctgagcagcaaccccagagaccttgacagcattggagtctgaccttcagccctgtccaactacagatttcaaacatgagtaccaccatgccagggaacccagcctgcaaccctgcctaatcagaggttatcacagagcccagccagcagctgtgcttgattatgcagcctagccaatggtctcactggactgtgaagcacaaccaggagccacacctgacttcatataacaggcagcagcccctcgtaactaaagaacccaatagcaaaatctgcttgctcatggtcactatcagctggtccatccagaatcttaggctagactaaatattgaaagtgtccatccccaccaaaggacatctacaaaggccaaaagaggaagccaattcatcaaacgtacagacatgaaggtaagtacacaaagattacaaaaaaaatcaaggaaatatacgccacaaaaagaaactaagagagaaagctccaacaatgaaccctaaaaatatgaggatctataaaatgactgacaattcagaatattccttctaagaagatcacggatgtattagtttgttcttgcattgctataaagccctgagagtggaatttataaaggaaaagaggtttaattggctcacagttcaacaggctgtacaggaagcatgatgctaccgtctgttcagcttctagaggggcctcaggaaacttacaatcatggcagaaggcaaagggggaacaggtgcatcacatggctagagtaggagcaagagagagtgagggcgaaggtgccacacacgtttaacaaccggatctcatgagaacaccctcacttccacgagaacagcaccaaggggatgatgctaaatcattcaggagaacccgcccccatgattcaatcacctcccgccaggcccagactccaaaactgggaattacaatctgaaatgaaatttggtttgggacacagatctacaccgtatcaatagaattataagaaaatatggatagaaaagtaaataaaacttggaaaacaatatgcagacaaaagaattagtttgacaaaggaacggaaattatttttaaaaatagaaatcctagagataaagaatacaataactaaactgaaaaattttattaaaagcttgaacatcagactcaaacaaatagaagaaagaatcagtgagttcaaagacaggacatttaaaattattgagtcacaggagcaaaaagtaaaaagaataaagaaggcttatgaaaattatgggacaccatcaagagacctaactttcacataataggagatccaaaggagaagagagagagaaatgccccccaaaaaagcatatttaagaaaataatggctgaaagcttcccaaatctagaaaaacatgtcaatatccagggacagaagattcagaggttacaatcgaattcaacccaaagacagttcacgaagacacatcataatcaattatcaaaaatcaaaaacaaagaaagaattctgaaaaccaaaagacagaagatacatatcacatacaagggagttgtaacatggctatcagcagatttctcagcagaaaccctgcatgccaggagacagtgggaagatatatactcaaagtactgaaggaaaaaagctgtcaatcaagaatactctacctggcaaagttatccttcagaaataagagagaagtaaaatcttcccgcacctccatcttcccccgaaaatgagggaggtcatcaccatgagtcttgccttacaggaattatgaaaaggagttatttaagctgagaaacagtcactttcatatgctaataacataaaacatatgaaagtaaaaaactcaatggtataagtaatacatagtcatactcagaagactttagtgctgtaagtatggtgtgtaaagcaattttatctctagtatgatgcttaaaaaacaaaacttttaaaagcaactataactgcaataaactgttaagggaggccaggtgtggtgactcatgtctgtaatcccagcactttgggaggctgaggtgggcagaccacttgagctcaggagttcaagaccagcctgggcaacatagtaagaccccatctctactaaaaatacaaaagttacatgggcacagttgtgtgtgcctgtagtccccgctactcgggaggctgaggcacgagaactgcttgaacctgggaggcggaggttgcaatgagctgagattacaccactgcactacagcctgggtgacagaccaagactctgtctcaaaaaaaaaaattgttaaaggatacaaattataaaaagctgtaaattgtgaaatcaaaaacataaaattaagggagaataaaagtgtacagtttttatatgcaataaagttattatcatcttgaagtagcctgttataagtagaagatgttttatgtaagttgcatggtaaccacaaagtaaaaacctatagtagttgcacaaaacataaaaagaaaggattcaaagcatatcactacagaaaatcatcaaactgcaaagaaagatagcaagtgaggaagaaaaaaagaacaaagaatctacaaaacaaccagaaaataaattacaaaatggaagtactgaatccttacctatcaataattactttgaatataaatgaactaaattctccaatcaaaagacataaagtaactggataaataaacaaaactcaactacatgtttcctacaagagactcatgtcatgtttatggacacaaatagactaaaagcgaagggatagaaaagatatttcatgcaaatagaaatgaaaagagagcaagggtagatatatttaaattggataaaatagagtacattagtccattctcacactgctatcaagacatacatgagactgggcaatttatgaaggaaagacatttaattgactcacagttcagcatggctgcggaggcctcaggaaatttacaatcatggtagatggcaaaggggaagaaagacacctccttcacagggcaacaggacagagtgagtacaagcaagggaaatgccagatgtttataaaaccatcagctctcatgagactcacccactatcaagagaactgcatgggggaaaccacctccatgatccaattacctctacctggtcccacacttcatacgtggggattatggggattacaatttgaggtgagatttggatggggacacagagccaaaccatatcatagaatttaagtcaaaactgtaaaatgagaaacagaaggtcatcatatagtgataaggggctccactcatcaaacggatataacaattacaaacatatacatacccaatataacagcacctaaatatataaagcaaatattcatagatatgaaggaagagatagactgtaatacaataacaggagagaacttcagtactacactctcaacagtagacagatcatccacatagaacatcaataaggaaacatcagacttaaactacactttagagcaaatgtacctaaaagacattatgctcagcattccatccagcagcaagagaatacacttatgtctcaagtacaacatgaaacattctgcagaactatgttaggctacaaaacaagtcttaacaaatttaagaggatttaaataatataaagtgtctttttcaatcacaatggtatgaaattaaaaatcaattaacaggagaaaccttggaaaattcacaaatatgtgaaaataacataatcctgaacaaccagtaagtcaaaaaaatcaaaagaaaaattaaaaaaaaacttgagacaaacaaaaacgggacacaggatgccaaaacttatgggatatagcaaaaggagtcctacaagggaaattaatggcatttttttaaaaaaagaaagacaaacctcaaatcaacaacctaatattatacctcagaactaaaaaaaaggaaaaatgaactaagcctaaagttaggagaaggaaggaagtcataaagatcagagcagaaaaaaatgaaatagagactagaaaaacaataaaaaagatcaatgaaactacgagttggtttttcaaaaaaataaaatttactaaacattagcttgactaagaataaaagagaagactcaaataaataatatcagaaatgaaagggcagactttaaaatcgataatatagaaacacaaaaacaagggagaattacgaaccactatacatcaacaaattgtatagctgaggaaacagatgaattcctacacatatagaacctaccacgactgagtcatgaagaaatagaacatctgaacagaccagcaatgactaaggagactgaatcattagcaagaaacttctcaacaaagagaagctcaggacatgatgaaaaagagaagcttctcaacaaagagaagcttcagctcactgctgaattctaccaaacattagaagaactaatatcaatcctgctcaaactcttcccaaaaaactgaagtagagggaatatttccaaactcatatcataaggccaatgttaccctgataccaaaaacacacaaggacacaaggaaagaacattacaggccaatatccctaatgaacatagatgcaaaaatcttcaataaaatactagcaataaaaaaacaaaacccagaattcaacaacacattaaaatgatcagctaaccacgatcaagaggaatttatccctgggatgcaaaagtgtttcaacatatgcaaatcaataaatgttagacaacgcattaataaaatgaagaataaaaaccacatgattatctcaatagatgcagaaaaatcacttgccaaaattcaacatcatttcataataaaaactcttaacaaattaagtatagaaaaaaagtctctccgtctacctctccccctccccctccccctctccccacggtctccctctccctctctttccacggtctccctctgatgccgagccgaagctgtactgtactgccaccgtctcggctcactgcaacctccctgcctgattctcctgcctcagcctgccgagtgcctgcgattgcaggcgcacgtcaccacgcctgactggttttcgtatttttttggtggagatggggtttcgctgtgttggccgggctggtctccagctcctcaccgcgagtgatccgccagcctcggcctcccgaggtgccaggattgcagacagagtctcgttcactcagtgctcaatggtgcccaggctggagtgcagtggcatgatctcggctcgctgcaacctctacctcccagctgcctgccttggcctcccaaagtgccgagattgcagcctctgcccggccgccaccccgtctgggaagtgaggagcgtctctgcctggctgcccagtctggaaagtgaggagcatctctgcccggccgccatcccatctaggaagtgaggagcgcctcttcccggccgccatcccatctaggaagtgaggagcgtctctgcccggctgcccatcgtctgagatgtggggagcgcctctgccccaccgccccgtctgggaggtgaggagcgtctctgcccggccgccccgtctgagaagtgaggagaccctctgcctggcaaccgccccgtctgagaagtgaggagcccctctgcccggccagccgccccgtccgggagggaggtggggggggtcagccccccacccggccagccgccccgtccgggagggaggtgggggggtcagccccccgcccggccagccgccctgtccgggaggtgaggggcgcctctgcccggccgcccctactgggaagtgaggagccccccgcccggccagccgcccagtctgggaggggggtgggggcgtcagccccccagcccagccagccgccccgtctgggaggggggtggggggggtcagccccccgcccggccagccgccccgtccgggaggtgaggggcgcctctgcccggccgcccctactgggaagtgaggagcccctctgcccggccaccaccccatctgggaggtgtgcccagcggctcattgagaacgggccatgatgacagtggcagttttgtggaatagaaaggggggaaaggtggggaaaagattgagaaatcggatggttgccgtgtctgtgtagaaagaagtagacatgggagacttttcattttgttctgtactaagaaaaattattctgccttgggatcctgttgatctgtgaccttacccccaaccctgtgctctctgaaacatgtgctgtgtccactcagggttaaatggattaagggcggggcaagatgtgctttgttaaacagatgcttgaaggcagcatgctccctaagagtcatcaccactccctaatctcaagtacccagggacacaaacactgcgaaagcccgcagggtcctctgcctaggaaaaccagagacctttgttcacttgtttatctgctgaccttccctccactattgtcctatgaccctgccaaatccccctctgggagaaacacccaagaatgatcaataaaaaaaaaaaaaaaaaagaaagaaaaaaaaataccataacataataatcaacatgtatgacaagcccacaggtaaaatcctactcaatggtgaaaagctgaaagctcttcttctaagatttggaattagacaaggatgtccacacttattttcaacatactagtagaagtcctagccagagtaatttggcaagataatggggaaaaaaggcatcctagtaggaaaggaagaagtagaattgtctctgtatgctgatgacataaactatatacagaaaaccctaaggattccacacacacacacaaaaactgaattgataaatgaattcagcagagttgaataaaatcaacattcaaaaatcatctgtgtttctatacaatagtaacaaacgattcaaaaaagatttttttttttgagacaaagtcttgctctgttgcccaggctggagtgcaatggcaagatctcggctcactgcaacctccgcctcccaggttcaagcaattctcctgcctcagcctcctgagtagctgggattacaggtgctcgccaccatgcccaactaattgttgtattttttgtagagatggggtttgaccatgttggtcaggctggtctggaactcctgacctcagatgattcacctgcctcagcctcccaaagtgttgggattatagatgtgagctagcactcccagcccaaaaaagaaatttttaagaatctcatttataatagcaataaaaataaaataattagtattcatttattcaaagaggcaaaagatgtatacattgaaaactataaaacaccaatgaaaaaaattaaggaaaacacgggtagaaacatatcctgtgttctcggatcagaagaattaatagtgttaaaatgcccatactacccaaagcaatctacagattcaagcaattcctatcaaaatgccaatgtcatttctcacagaaatagaaaaaccaatccgaaaattggtatggaatcatagaagactccaaatagccaaagcaatcttgaacaataagtaacaacaacaaagctggaggcatcacactacctgacatcaaaatataataaaaaactacattaatcaaaacagcatggtataggcacaagagctgatacattagccagaggaacaggatagagttcagaaataaacatccatttatagacaattgatttcaataaaggtgccaaaatcacacaataggagaaaggatggtctcttcaataaatggtactgagaaaagtggctattcacatacagaaaaaaatgaaattgggtttttatcatacaccatatacaaaaatatactcaaaatggattaaagacttaaatataaaagttgaagctctaaaactagtagaaaatacagggagaaagcttcctgacatcagtcttagcaaagatttcttggatatgacaataaaagcacaggcaacgaaggcaaacacagacaaatggaattacatcaaactaaaatgtttctgcacaggaaactaaacaatcaacaaagtaaaaaaacaacctacagaatgaaagaaaatatctgcaaaccatacatattataagggattgatattcaaaatatataaagaacacaaataactcaatagcaagaaaaataaactgattaaaaaacaggcaaaggacctaaccagatatttctcaaaataagacataaaaatgccccacaagctgatggaacaaaatgctcaacatcactaattagggaaatgccagttcaaactacaatgagatatcacttcacaactgttagaacagtttttatcaaaaagatgaaagtgaacaagtgctgctgaggatgtggagaaaagggaacccttgtacactgctggtgaggatgtaaattagtataaccactacagaaaatgtatagaatttcctcaaaaaactaaaaatagaactaccattttttcatccagcagtcccactactcagcataaatcaaaggaattgaaatcaaaatttcaaagagatatatacactcccatgttcattgcagcattattcacaatagacaagatatggaatcaacctatgtatccattgaaggataaagggataaagaaaatgtggcatgtatatatcttggaatactattcagcctttaaaaataaggaaattctgtcatttgtgataacatggataaacctggaggacattgtgttaagttaaataagccaagcacagaaagacaaaatggcatgatctcacttacaggtagaatctaaaaaagttgaactcagaagtagagagtacaatggtagttaggaaaggctgggcgagagtaggaaaagggaattgggagatactgttcaaagggtacaaagtttcacttagacaagaagaatactttctagtgatcaactgcagagcatagcgactatagttaataatatatatttcaaaattggtaagagagtatatttcaaatagtcaccacaaaaaaccagtaaatgaggttatggctatgttaattagcttgttttaatcatctacattgtgtgcatgtgtgcattttgatatatgtatcaaaacatcacattgtatctcataaatatatacaattatgatttgtcaattaaaaatataaaaaattaaaattaaaattatttggggtcaaaaaaatctcttaaggatgaaatggtaagcaaaagtgacacaggaactaaacagaaggtaaatcaaggatggtaggcctgatatattcagcatttttaagacaaatctacatataaaattggtttttgtttcttttactttgggcaagttgaaatattaaaaataaataataaacattaaaatatttaaaatgttaaacatttaagtacttaaaatagaagaattttatgtactcaaagttggtaaaaatagattatcttctatctaaataatttaaaacacattaaaaggcttttgtatcaaaagattttaaaaaattcaaagtaaataacaactgatattataacaaaacaaaatgcatgttattttagatgatactgaccgaaaatgccagaccccattccattctcttttcacaatataacaaaaattcaaaaatcatcttacaaaacactttgtagaaaaacacagcgttctcagttgccatagatacacaacattctgcttcatcatgcaatattctgtattccattcaacttcaagtaaaaagaaatacataaaggaaacgtctttattgtgtaactcaggcttcaagagaacctaagattaaaacctagtggccaaaaaaggtacagaaaagggcttgagtacatttctgtggctgtttagtgttcaaagataataaagtgtgttaggtttttttttgttttgttttgttgttttttttttggagacagtgtcttgctctgtggcccaggctggagtacagtggcacaatctcaactcactgcaacctctgactcccagttaaagcgattcttctgcctcaagtcttccaagtagctgggattacagacaagtgtgagccaccacacctggcttgaagtgtattagattttcctgatatggtgcttcaaaaattacttgttggtatacgtaagagaaagcccacgtatccatagctttaacaaggggtccccaacccccagggccatggactggtactggtccttggcctgttaggaaccctgcatccagcaggaggtgagtggcagggtgagtgagcattaccacctaagctccacctcctgtcagatcagtgttggcattaggaagattctcacaggagcgtgaaccctattgtgaactgtgcatgcgagggatctaggttgtacactccttaagagaatctaatgcctgatgatctcaggtggaacagtttcatccccaaaccatccttcaggtccatggaaaagctgtcttccagaaaactagtacctagtaccaaaaaggttgggtactgctggtttaaatagtataggtgcttatttttttttcccttatgttacaaaaagttcagaagtagtctgctacattggcagctcaaagatgtcagggcaactgcaattcagccttctcctagcagttgcaaaatggtttctgtagctttgcatatctggaaaaggaagggtaaagggtgaagggtaaagactgaagggcaaagggtaagtatcaggtgagttgaatccccttttagggggctttcctgcaagttcctgccgatagcaaattaattatcctatttgcatctcaacttacttgaactacattaaatgtccagctccatctacaaagtaagagtatagttttaaaactgtgtctcatgttgccctaagtaaaatcaaggttctattactaataaagtaggaatgtatattggatgagcatctggcagtctccatcagatacagtcataataaatcattactctttctccagtaaagtactattgtgttattatactctaagtaatttgacatatacaattcatattatacaattatgcaattatatataagtacacaattcaaaatatattttgttgtatttaatacatatttaaggtgtaagaaataattcttcaaatattttcatatgtagctagacagatacatagatatgaatagataggcttaaggtgtaagaaataatccttcaaatattttcatatgtagctagatagatacatagatatgaatagataggcaggctggcagatagacataaatggcagaaagataaacatttatttctgtgcctggctaaagaacaaattggaactagtgttctcaacaagaaaaatcaatgaccatgttaactgatgatatctgtagtgcatttgtgaaagacaatcatcagttgatataagaaagacaacatgtcttatatgtatgttagtgtgggtgaagaaaggtatgaaataggagaggtaggaaatgtagaaatatttctagacatttaactacattactaacaccataaaagtttacctaaacaaaacaacaagcctaacatatctatttgtctgaaaaggattttatttctccttcacttatgaagcttagttgcccgataagaaattctgggttggaaattcttttctttaagaatgttgaatattggccgccaatctcttctggcttgtagggtttctgctgagaggtctactgttagtctgatgagtttctctttgtaggtgacctggcctttctctcaggctgcccttaacattttttcccttcatttctaccttggaaaatctcatgattatgtgtcttggggttgatcttctcatggagtatcttactggggttctctgaatttcctgaatttgaatgttggcctatcttgttgtgttgggtaagttctcccggatgatatcctgaagtatgttttccaacttgattccattctccctgtctttttcaggtacaccaatcagtcataggtttggtctttttacataatctgatagttctcagaggtgttgttcatttattttcattcttttatctctaatcttttctgcctgtcttatttcagcaagatctaaattattttccctggtctacttaacttttgagacttgtcgttgcattgtgaagttctatgcagccataaaaagcaatgagatcatgtctttgcagggacatggatggagctggaagccattatcctcagcaaactaacacaggaacagaaaaccaaacactgcatgttctcacttgtaaataggagctgaacaaagagaacacatagacacagggaggggagagcatcaggataaatagctaatgcatgtgggtcttaataccttaagtgatgggttgaaaggtgcagtaaacccccatggcacatgtttacctatgtcacacctgcatgtcctacacatgtatcccagaattaaaatcaaatcaaattacattttttagaaatccattaatgaattaactattcttccctgctcaaagcactgccccttacttcattattctactacttttagataatcagctttcatatatcttaagaatcatatttctttattaataaaagaaaagcaataaagttaaatgggttattattacagttattttcatgaacatcataattgttgcagaatatcactaacattttggaaacacagttaaagaaattaaaactctattttttttttgtttttgtgttttggagaaagggtcttgctctgtcgctcaggctagagtgcagtgcggtggagtgaccatggctcactataacttcaaatggctgggctcaagtgatcatcttacctcaacctctggagtaactggtaccatagttacatgccattttgtccagataattttttaattttttgtcaagatagggggtctccttctgtttcccagactgactcctgggctcaagtgatcatctcacctcaaaagttctgggattataggtatgagtcaccacgcctggccaaaacactttcttacatattaaaataataaattccttttggacaagtattaacattctaaaaaacattttattgaaatataataaatctaaagaaaagggaacatggatgattttctcaaattgaatacctccatgtaactagcactcaggtcaataaattgtatctcagaagtcattacctctccatccaagaataacttgcattcactaattttgtttggttctgtttctaacataaatggattcatataataaaaactgtttgtgatctttgtggctgatttcgttcaactttacatctgtgaaattcaaacatgttattaggtagatttgtagactcttcattcacattgctgtatagtactccgttgtgtgactagaccacagtttacttatccatgttacttctgatggatttgggcattttccagtttttttactattataaatcatgctgctattaatattctagtacatgtctttttgtcaagtacatacatatttcagtagggcacatatgtaggtgcagaatagctgagaataaggcacgcatatatttagttttcttagatattgtcaaatagttttccaaaatggttgtacccatttatattcatattagtagtatacatcagtttcattgttccaccattcttgtaaacactttttattttctgtttcatttaaggcattccattggatgtgtaatagtatagcattgtggttttatttttgcattcccctgatgactaaagaaactaagcccctttttatttattttttttgagatgaagtctcgctcttgtcccccaggctggagtgtaatggtgcgatctcggctcactgcaacctctgcctcccaggttcaagtgattctcctccctcagcctcccgagtagctgggattacaggtgcctgccatcatacccggctaatttttgtatttttagtagagatggggtttcaccatgttggccaggctggtctcaaactcctgacctcaggtgatctgcctgcctcggcctcccaaagtgttgggattacaggcatgagccaccatgcccagccctaagcccctttttatatgttaattggccactatgaaatcaacttttgtgaaatatctgttcaagtattttacccatttgtccatttgaagtcagcccttattgattcacagttctttatctattctggatatgagtcttttgttcaacacatgaatttcaattatcttccccaacctggagtgccctttcacctttgtactggtctcttttgatgaatagaagttcttaatttcaatgaagcccaattttaaaatattttgttttttatgcctttttgtttcctatttagaaaatctttatctattcccaactatcaaaaatgttcctacatcttcgtttgaaaatttaatcgttttacccttcatttgtatatttacaatccttttggagttaatttcataaatggggtaaaataaggggcaagattctttttccccccatatgactatctacttgatactgcaccatttattgaattggtcatttttttccccattgcactgctctagctccttttgacatgaatcagactgatcatataggtgtgggtgtttttggtctctttcttctgttccactggtcatcttgtgccaatatcacactctattaattaccatggtttaacagtatcctcaatatctgataacataagttctccaattgcattcttcttcaagattgccttcactttgcatttcatgtacatcttgaaatcagcttcagagtccccctctgttcccctaaaatggcactgttaagattttgattttttaaaattttttttatttttaagattttgatttttataattatggtgattctatagatttaagaactgccatttttataacatggagacttcaaatccatacacatgatatatccctcagcttattcaggtcttctttagtttctctcaacaacactttctagtttcagaacagagaccttgtgcatcttttgttagatttattcttgggtaagtgatgctttttgatattactataaatggcatcttcttcaagttttattttgtatttgtgctggtaggtacgaataaaatgtatttgtaaaatgtatttgtatatttgtatacaaaatttacttgtatatttatttatatttagtgacctaagttcattaccaataacattttaacaagcaaacattttaagaaactcatagtcacacaaagatgtcacaatgcagatatgtgcataactcattgggctaccttagatgactctcctccgtgctctcttaatgacctgtgaactccactagttacaccttctattataatcatacacctttatgcattggtctatcacacaagccacaaacatgcctataaataagctgtgtattcccagaatctacaacagtagctagtagagagcaggtattcataaattttttatgaataaatgaaagaaaaaatcccgtctgttgaatcctttgactggccagtaagtcaataaaacagtccctgtattaaaaaataacaatgttactattttcacaaatcagccaagtggagacataatgacatgttttctagcctgatattctcagtagatgattattttgcttattttctttctgcaaaagagattagtcactgatgaatattagtaggaaaaagcttcacttactatccaattaagcacttaaagatacaagttttcttttaagtgttttgtttattttttgtttttcaaagccaaatacttatacatattctttggaagctgtcatttagaattcattaattatcattatagcatctatttaaacgtttaaaggtattctaaaattttatctctgctacctaatcttaaagacaatatttaatagagacatttctacattatcatcaataattaaccaagagaaaatgcttctatttatattgggtctcttattatcataaaagtagtcttaaaaggctgatttaaaattacatgagctaatacaagcctaaaaggacaatgagacaaaggtccaagtcataatgaatggtttgtatgatgactggttttgttctttaagtctatttcttatccaatgacacataatgacacaaacatatccagatagtgttcttgcttccttgtaagttgagaattcctttcattaattcaataacaataataggatgatacactaaaacttaaaaatctctaagaatgcaaggaactgactagccagtttcaattgtgctacaaaccaggataaacctcactcgtcaacaccagcgcttttcagaactttgttttcatgacaaaccagtgggttttccaggtataaagttagcatcatatatctaatgactgttaaaaagaaaaggagtagaatttaaagccagatatttagcagcaaatagcatttaataaggatgtattttcaagaggagaaaaataaattaggaaagtcaagtggctagcggaagccccaggaggaactagttagctgacgttcatattgctggtatacaagatttaaaagatttactttaatagaattgctgccaatacttcagagaacatagctgtctttttcagtcatttatgtgtttcacagagaataggtaaatatagaacgctgtttctttgaaaaatatgattttatatatatatatatacatacatagaaataattctaacgataatgcattttcacaattaaaatatgtacattttacacagttagttgctgagagctaaactgataataaatttcaccatttcagtataaattagattatttaagcaatattaaatgagataaatgttcttcaaagcgaaagaaagagtgtgcagcaattttttaaaaagtttaagtctgttacattttgtctcatgggctttatttttgaaacagcaattctctttctaaaacaaactcaaagcttttattttttaattcaaaatcccactgtctgcaatctgcagcagtttccaaatggaaaaagatgccctacagctctgctggcttttaaacaaaatatttctgtaagaagagaaaagcggttcaaaacaagaacagaaaaggaagacttaaaaatatagactatggaaaaatctaaacacattatgattatccaaataatgactgctgattgatttcttttagaatttgagttatatcagattcacatttttttaatcaactgataatctgtaatcaaagacacaatttaccatgtttgacatatatattttaatattttaacatctgttcaaatttgccatgtaagaattacttgatttgcgaataagcctagctataaggattatgttctaaatggggtcccttgttactacactcacaccaaaggtgctttctttatttcagaaacccaactgcacttggcaaaactacatataattgaaaccagtgaagaatatttcttcaacagaagacaaccaaaataatttcctgttcatgggttgctgttactattagttttcgaggagtccgaatctagcacactagacagacagatcaggcctggtgagggctgctcagaaagatgggacataggaatcaggtatgtggggggaatttgaggggatcctagaggcatgcgccaaattgggttcttcgctggatcatttaaccagtccacagcaatgtaataccaagaagacagaaacacatgaactcttagataaagaagaaggagactcaagtaggtctggcagaattgaagaagtaagatcgaatacagacgatgagccaggcattcaacaaaacagtcagagatgatatgaggagtggaccaattaaaagggtagttctggaaccaattccacaaataggatctttcattcctggctatccttatctggtaacatcctcattttgtctggatagggttcttaaggtttctgagattatattatctccggggctttcaattctcccacagaaatacaatattctttttttaacttaaaaaaattaatcatttctccattctctccaatttttggacatgtattttctaatttttcctcattaataaataacatcacaatacacatccatcagcacacatctcacacactgtattttttaaaaaatagccttagaagtagaatcaacaggtaaatggagacacagtgttaaaatgatccttcaaaaaggttatacaactttacatgcccagcagaaatgcatgtcactacctgttttcttaggccttcatgaatttctatctatgtgttaggtggaaaatagcttattgctgttttaattttttttaaactttactagtgaaaataaagatttcttactgtcaatttctaccaaaaattacattggaattttgaaagaaattgcattgaatttgtaggtcaattatcggagaattaccatcttgacaaaattgagctttctaatccataaacaaagaatagctctccacttacttagatctttttaacatttctcttaggaatattttgtttttaatgcttaagtcttcaatttattttatttgtttacttgtaaatattttattcttttcgacgttattatgaattaaatggctttcttaatttcattttcaaatatttcactgctagtatataaaagtgtgatttttacatattttatcctgcaagcttgtttaaatcatgtattagttctagtatatctttaatagattttgtgggattttcactatacaggatcataatatctgatacatttgtacttctttctttccattctggatacattactagtagtagtagtagtagtagtagtagtagtagtagtagtattttgccttgatgcactggctagaagttccaatacaatgttgaataaaagtggcaaaagcagacatctttgccttgttcttaggaggaaaagaattaaatcttccaacattaattttattagctgtggagttttcatagatgtcctttattaggttgagtaaatttgcttcgagtcctaatttgccaagaatttttaaaatcataaatggtgcttgaatttttcaaatgctttttcagcctttatcaagacaatcacgtgattttttcccttattctattaatatgatatgtaacattaattgatttcctaatgttaaaacaatcttggattcctgcgacaaatcccgcttggtcgtggtgtataattgtctgtatatgttgctagattccgttttccaaaatctcatgaagggcttttgtgactatgttcatgacaggtatcaatccatagtttactagtgaaatatttgtccagctttgatatcagagtaatactggcctcacagaattaactgagaagtattccttcttcctcaatattctgaaagagttttcaaagaattaaaattatttcttctttaaatagttgatgtaattcgccagtgaagccatttgtcttagacttttctttgtgagaatatttttaattggcaattaaatttcttattatatttcaattcagattttctattcttgggatagttttgatcatttgtatctctctagaaatttgtccatttatctatgttgtacaaattgttggtatacaaagtttttagtaatatcactttataatcctttcattttctagaaaatcaatagtggtatcctatcctttgactcctaactttggcaatttctaactcctcgtttttatggtttgtcaatcatgctaaagtttgtcaattttgttgatcttttcaaagaaccagtacttggcttcattaattttccatatttttatgtatttcaatcttagctttctgctctaatcttcccccgcccccccctttcttccacttgcttagaagcttgctttgcttttctttttctggtttcatcaggtgaagtttaggttactgatttgagaattttatttttggatataggtgtttaaagctataagtctttctctaagcactgcttttagctgcattccataaatcttgatatgccatatttttgtttccattcagcttaaaatattttctaatttcccttgtaataccttctttgacccattagttatttaaaagtgggttatttactttccaaatatgtgaggatttcccagattttcttttgttgtttacttctaatttattattgttgaggtcaaagaacacactttgtatttccatccttttaaatttgagacttgtcttgtatccaagcatatggctatcctggagaatgttccatgagtgcctgcagtcattgggtggggtgatttaaatcatcacccaagtctcagacttacccataagtggcataagtacaaacagatccaaaggagcacagcaaagactgtgaaacaactgaagctggaatccacccacagaagatgagacaagactttctcactgaaaagaactgggaattctaacaggactcagagaataaaaaacactcagtatatactcttctgcttgcatattctttcattcagcaggattttgagatccatccatgctgttgtatcaataattcattccttttcactgctgagtaatatttcattgtacataccacatttcatttatcctttcaccttctgaggaatattttggttgcccaagttttgagcttttatgaacaaatctgctgtcagtatttgtgcaatagtctttgtctagacatgtctttatttctctttggtaaatacataggaatggaatgactgacatatatggtcattgtgtatttaacattttaagaaaattggcagttttctaatgtggctatactattttatgtacccatcagcagtgtataagagcttcaattgcaccacaactttgtcagcacttggtattgtcagccagtctttatcatcttagtcattctaatgaacgtgtagtagcatctcattttggtttttaatttgcatttccttgatgaatgatgatgatattgagcatcttttcatgtggttattagtcatttgtatatcttcttttgtgaagtgcctgttcaaatcttttgcctgtttttaattggattgtctttttattattgagttctaagatttcttttacattttagatgcaagttcttcgaaatacatgtattgtaagccttgtcttccattttctggtttgccttgtttttgtttttttaatgatgtctttcaaagagcaaaagtttttagttttggtgaagtccaatgtagcaatcttaactgaaatttaatttctagtttaattgcattgtggtaagaaatatgtgttctcagacatgttaagttttagaaatatactgagggttcccttacagtctactaagtcttttaactgttttatgagaacagagatttaatatgtagtgtcaaatggtagaaagttgaaatacagattaagatggcagacaggaggcaggactagcttgcagctcctctccgatggccagagaagtgtatggagactcacatcgtgaactttggctccaagaactactacaggaacatagcaggaaagctgagagaatccacagaccctttgaaagaactggatcacatcactgctgcaggctccctgagacaacaaaacactgagagtctgcttgctttctcaatgggaggctcgtgatctggggcaagttctcaaccctgattgccagttgcctggaaatagactcggtgctgttggaaggacacagtgggagtcagacaggccttcaggactgagggctgtgtgggagcagggtgaggccttgactgctggctttcccctacttccctggtgacctgtatggctcactagaggcagccataatccccctggaaatataactccactcgactgggaaccacactcccatcccccgcagcagtaacagccagccccacacaaggagaggctgagctcagacatgcctattgctgcccccacctagtggtctttctctgcctaccctggtatcagaagacaaaaatcgtaatcttttgtgagctctatggccctgtccactgtctgagaaaactgaatacttaagccggtgtccctagggcaagtttgcatcctccctataggaccatagctgacgcactcttgaagtgccacctcccggctggaggccaaacaacacaaaaccagcgcactaaacaaaaacacaaccaagaaccctcacagagtccacttcactcccctgctatttccaccagagcaggtcctggtatccatggctacaagacgtaaagacagatcatatcacaggactctttgcagacactccccagtaccaacccacagcctggtagctccactgggtggctagacccagaaaaacaagaacaatcactatagctccgctcttaggaagcctcattcctaggggaagggggagcctcattccaaatcaccacatcaagggagcaccccataggacaaaagaatctgaacagcagcaaaccccagatcttccctctgacatagtctacccaaataagaaggaaccagaaaaaaaattctggtaatatgacaaaacaagattctttaactcctccaagagatcataccacctcaccagcaatggatccaagccaagatgaaatctctgaattgccagaaaaagaattcagaaggtcaattattaagcgaatcaaggaggcatcagagaaaggtgaggttcaacataaagaaatcaaaaacatgatacagaatacaaaagaagagttcttcagtgaaatagacagcatatataaaaaacaatcataatgtctggaaatcaaggacacactcagagaaatgcaaaatgcactggaaaatctcagtaatagaattgaacaagcagaagaaagaacctcagagctcaaagacaaggctttcaaattaacccaatccatcaaagatgaagaaaaaagatttttaagaaatgaacaaagcctcctagaagtttgggactaagttaaacatccaaacctaagaataattggtgttcctgaggaagatgagaaagctaaaagtttggaaaacatatttgagggaataatttaggaaaacttccccagccttgctaaaggcctagacatgcaaatacaagaagcacaaagaacacatgggaaattcatcacaaaaagatcatcgcctaggcacatagtcatcacgttatctaaagtcaagacaaaggaaagaatcttaagggctgtgagccaaaagtatcaggtagcctagaaaggtaaacctatcaaattaacagcagacttcttggcagaaaccctaaaagctggcaaggagtggggtcttatttttagtttccttaaacaaaacaattattagccaagaattttgtatccagcgaaagtaagctttataaatgaagaaaagacatagtcttttccagaaaacaaatgcggagagaattcgccaatacaaagccaccactaaatgaactgctaaaaggtgttctaaatcttcaaacaaatcctctaaatacaccaaagcataaatctcacaggacctatataacaataacataattaaaaaacagtaggtattcaggcaacaaatggcacgatgaatagaataatacctcacatctcaatactaacattgaatgtaaatggcctaaatgcaccacctaaaagatacagaatggcagaatcgataagaattcaccaaccaaatttctgctgtcatcagtagactcacctaacacataaggactcacataaacttacagtaaaggggtagaaaaagatattccatgtaaataaacaccaaaagcgagcaggagtagctattcttatatcagacaaaacaaactttaaagcaactgcagttaaagaagacaaacagggacattatataatggtaaaaggactagtccaacaggaaaatatcacaattctaaatatgaatgcacctaacactggagctcccaaatgtataaaacaattactactagacctaagaaatgagacaggtggcaatgcaataatagtgggggagtttaatactccactgacagcactacacaggtcatcaagacagaaagtcaacaagaacaatgaacttaaactataccctacaacaaatggacttaacagatatttacagaacattctacccaacaactgcagaatatacattctattcagaaggacatggaacattccccaagatagaccataacaggccacaaaacgagtctcagtaaatttaagaaaatcgaaattatatcaaatactggtgggaatgtaaagtagtacaaccactatggaaaacactgtagagattccttaaagaactaaaagtagatctaccatttgattcagcaatcccacttctaggtgtctacccagaggaaaagaagtcattatatgaaaaagatacttgcacatgcatgtttatagcagcacaatttgtaattgcaaaaatatggaaccagcccaaatgcccgtaagtcaacgagtggataaagaaattatgatatatatacatacatacatacacacacacacacacacacacacaccatggaatactacttggtcataagaaggaacaaaataatggcattcacatcaacctggatgttactggagaccattattctaaatcaatggaaaaccaaacatcgtatgttcttactcataagtgggagctaaggtatgaagacacaaacacataagaatgatacaataaactctggggactcagggggaagactttgggtgggggaggtgagggttaaaagactatacattgaatacagtatacaccgctagggtgatgggtgcaccaaaatctcagtaatcaccactaaagaaattattcatgtaaccaagcaccacctgtgccccaaaaacctattgaaataaaaaaataaaaaatttaaaaatatatacataaaaataaaaatgttaaacttgatcagctattccactcctaggtacagtagtccctccttatatgttctaagaccctcagtggatgtctgaactttggatagtaacaaaccctatatgcactatggtttttgctatatagctgcattgtatagggcaggtagggtatacagcatggatatgctggataaaaggatgagtcatgccttgggtaggacagagcaggacggcatgagatttcatcatgttactaagaacagtgcacaatgtaaaccttatgaattctttatttctggaattttccatttaatatttttggactgtggttgatggaaggtaactgaaaccatggaaagtgaaactttggataaggtgggactactgtacttattggaataaaatggaaacatatatctacaaaagtaaacgtaaaaaaataaaacgctaaaaaagaaaaagtcaaaatatagctgtcatataatttgttagttacaccccatttggattttacccattgacctgtcagagatggagaaaaatatatgaaaacatcccatgactatctatgtccatttctccatgtgttcctaacatcttttcatatttcgattgagtactcttgcctttagcatgcaaaaatatatccctttgtccagtttattgacttgtattgatttaatttgtatgatagtgttacaatcctactttcctttttttctgaatataagtgatatattttcatcatccatttattctaacttttgtgttaactttattttagttattagttttataaatagtatatttatggatttcagtcttctaatcaataccattttactagaaaaatttaacctattaatgtttattattacaattatatactctatcttattttggacattttgttgtatttctgcttctgttcctttggcagcctctcctctcaagctttgctttttaacttttcaagacttttatgagaatgtacaacttgttaattttattaatgctcatatttaaacattacaaaattatttttacctacatttccctaattttaagaatcttatgagtctcacatatttatgacaaagagttttagtatattttgcttctccaactcttgctattcatctacttttgatccttgttaatgtaatctagggatacaaattcaagttgttaatacatttgtattttctgttttatataccttccttttcaaaaaatcaattaatattagaattctattcttaagtagatttgtaacaattatttaaatttgtttctacttctttggggttccaggtttctctactcatcctttcatatgatggtttccttatgtgtgggaagtcttatgcttcatttctggattggttcatgtattcatacaaattttttccagaaaaatgtggtatatattatatgagctcttatatataagaacatgctttcctattgtttttgtaagcaaaaaactccttggttgtgtataaaatggaatcaccacttttttttactgcatgcatattacatacatgtatattacacgcattacattatatgtaacatgaatggtgcagtttcagcctaccataccatagctgtggatccaggcatttctgtactcctgggggttggggaaggtccctgctgccctagctggctcagaagtgcttgctcctgctgtctggtttctccttgctgtccgtgcccactccaatgttggagcaaagttagggctgagcctgggtgctgtcgcatgccagccccctgctgcctcagccacctctggactttggctgccaatgagcataggagggaagccaagtgggtgctgatggcagctcaatgctggcctgcaggcaacccttgacacctacagcctgggcaccatgaacagcagcagggggcagacagactcctgctcataaggggatgggtccctagtgaggcctcaccttcaggccagggagggcctgaaggctgggaggcctggctgcaagtcccacagactggagtgggaactcgtggtgccttttctgggcctccccatggccacccatggaccaatcagtgtgcacttcctcccctctgaggcacataaaagccccaggctcagccagagaagagcagatgtggggacaaccagctgcagaggggagctaccaactccagggcctcctctctcctaagagctgcagatgtcaggacaaccagctgcagagaggagcaactcatcccagggcctactctctgctgagggctgcagagacatcgggaccaccagctgcagataggagcaacccactccatggcctcctctctactgagagctggggagatgagaggaggacctgcctacagagaggagtaacccactctagggcctcctctctgctgagagctgcagagatgatgggactacctgtctgcagagacgggtttaccactccagggtctcctctctgctaggagctgaacactcactgggacaccctggctgcagaaaggagctacccactatgtgtctctgagctgttctattgctcaatgaagctcctctttgtcttgcttaccctccacttgtctgcatacctcatttttcctagtcgcaggacaagaactcaggacctgtcgaatggcagggctaaaagagctgcaacaaaaacagggctgaaacatgctccttgctcgccttgttgaaggcaaagagaaggagagaagagctacagccccagacctgggcgctcccgagccagggctatgacttcctctttgggttcgtgtggttcttggctcctccttgggttcctgtggttcctggcatctccaagcttccaggtgccaccacattccccagtgacagttgtggaagctgcttgcagtatacctggtccagccacagcctcacagagagctgacacccatgctggcacctggagctgcccacccactgcagcaggtggcatacctgactgcacagcggccagaccccatgcttgctcacataccccttgctgctccatgcctaactcacccttggcaggtgttggatacaggcagtagcctgagccaagagcagcgtatcaggctgagtgggtggaatgagcccagtgggccttagcaaaactcaggcaaaggtgccactagccacagaggtttctggccaaaaaagtgacaccctagggatcccgtaacacagggctcaatcctcagtcagattcaaacatgaaaccttccttaggcacatttctcccacccagtgtgtgcttgggactcctaaggaagataactatagtgtaaaataataagtgagtattgaaacattctttataatcaggaaaaactgaaaaaaactaaatatgcttgagtaggggagctgataaaatatactatattcatatgataaaataaatttagtgttaaaaagattgtactaaaacagcatggttagcacacagatacataatattagatataaaagggcaaacagaaatagtacttaaaatctgttcatatttatataatttttaaaaaaacaaaaaaacatttatgcctgtaacatattaatgcataaataatatatacatacatattatctatgggcattatgtatgcatataaaataaactgaaataatgcagccatctccagtatccatgggtgattggttccagaaccccctccagataccaaaatccacagacagtcaagttcctcatataaaatggtctagtacttccatacaacctgggcacatcctcctgtgtactttatcattgctagattacttctaatacctaatacaacatctacatgtcacttctatcacatggattcaacacagtcctctgcacatggcaaattcaagttttactttttggagcattgtcaaatttttccaaatattttcgatccatggttggttgaatctgtggaggcagaacccacagatacaaaaacacatggatacagagggctgactgtatacactcaattaattataatggatttctccagggaagaaagaataatgtgattagacatgaaaacaaagtaaactaaaacttcacctgaattttttagtttatataaaccacgttaacaattattgcatctttgcgatgggtacccaggtgtttgtaataattccctttattcttttacaaattttgtattttctttaaaaactaaaaaaaaaaaaactacccatcttatataagaattggagacagcctttgttcttcacaactgccagttgaaaataatttgctgtagctgatcaataagacactatttatagaacatgaagaaacacagacatggttaactggagcccctgctctaaagaaactgatcagtcatgggatttttctcttaggattatctatccttccaaagcaaggtacatgcttgccattactacatttatacaggggacttttaaatgatcattctggcattgcttgaaggatgaatcaagtggtaacatctctttctcattctgaatctctgacccgattgtatggctaattttgatacagctcttttaaaaagtgaaatgtttctgtcatatttaagatgagaatgtaccttcctactgagagagtgactttcaaaagggatggtgtggcagcctccttacctgctctttcatttcagcatagactttctctgagttcagttccacctgccgcttaaactcttccagagcggcatctgcctgctgggcctgcaacctctgaacttcagtcacacgagttagctgctcctctttttccctagaaaggttcagagaagcttcagagttaaaatataaaagagctaggcctgaatgaaagaacaatatttaaccccctctaaaataaaatccagattttaatttttttgatccaaatcctacaaaacttccctttagaaatttgacaataaactaatttgtctcaagagaaaaagggtataaacatatattgtgtattctgatgaaggcaaaactgctttcaaagatttctctaaaaacaaaactgagtaaaaccatgtgtctccatcaagtgatgaatgaataaacaaaatgtggaatagctatccaatgggatattagtcattcttaaaaaggaatgaagttctgatacctgctacaacatggatgaaccttaaaaacattcagctaagtgaaagaagccagtcacaaaaagttacatattgtatgattccatttatatgaaatttccagaataggtaaatccatggagacagaaagtaccttagtagttgctagggtctgagaggctggggaaatagggagtgattgccaagggatatgaaatgaggaaaatatgaaaatgttctggaattagatagtggtgatggttgcacatccttgtgaatatactaatatccaccaaactatacacttcaaaggagtgaattttatggtatgtgaattatatctcatgttttttttttaaaacaatgtacaaatagaaagatgtatgtctaccagaagttaatctgcagtgaagtcaatgcaacagagaaacatgatggcctaaaattattttactgccttctagcagattgcctaaaagaactgataaccatctcatttcttcataccttaggcggaaactatatagctgaaagggtccaacaaaacaaaaggaatctttgcatgttgatagaagaaaaaattaaagccttcagtttataaatgcatgccatttaacaatagttaactttgaattctaactaggcgctgggtattgtgcaatggaattttatatggtttggctctgtgtccccacccacatctaatcttgtagctcccataattcccacgtgttgtgggagggacccagtgggagataactgaatcatgggggcaggtctttcccatgctgttctcatgatagtgagtctaatgagatctgatggttttaacaagaggagttcccctgcacaagctctctttttgcctgccgccatccatgtaagatgtgacttgctcctccttgccttccgccatgattgtgaggcctccccagccacgtggaactgtaagtccattaaacctcttttgaaaattgccaagtctccagtatgtctttatcagcagtgtgaaaatggactaatacagaagtttatgtcttctctcatttattctcacagtaaaccagtataagagtgttattacatccttacttacacagaacaggaaactagggcttagagaatacttccaaggttacacacctagagtaacaacaggtcaagccaggattccagtcctgaaagtgtgcttctagagttcctgttgttggctgctatgccacactgctttcctgatcttccagatgccacaggtaagattaacttagctcaccttccctaaatgggaaagcttacacaagtgaaaaatatgttcttactattagctgtaacactgaaggatgctgggcgggggtgggtaatttaactcactcaaaccaaattttagagaaatatcataaaggggagaaaagacatttctaaaacaagatgatgcaatcttttaagacttgggcaaaaagtaatacgagtttttccaggttactcatctgagtttaaaatccactctaagacacaaaaatttctaggcttttcaataagaacgtacatatcatatatcaaaataccaaactttctccctctcccccaccaaattgaaaacctctttcaaagcttaagtggtcaaaagactgataagaaaaaaagtgtcacctaatttctacttcagcaagactctcttgtccctttacaatgaggttatcaacaatatagatatatagatatcgatatagatatagatatagataggggtgtgtgtgtgtgtgtgtgtgtgtgtgtgttctctcctcgcacccatatcccatccccacccctgtatttgggatccgcaaacaggcacatttttgttgacaggctgaaagagcatatcgtgcatgtttatttgtcattttaaacaccaccttgtgtctatttatcttttcatatcccatgtatccatctacctgaaggtgacaataatcattgcaatcccatgataaacaaaacagtttttccactaaatccctgttcctttatgtgtctgttttacagatgtagccaccatttttatgacctacagagtttaatactgccccaaggtgtgtgatgccctgcatgacagttaagccattccaggtcatgaggcatgccacatgtggctctcagtaactgcattttgcagcaatggggtacaggattctggaagtttttaaaagctattcttcaacttgtctactttaatgaactgggacctgggtatcttgttgttcaccatgtttcttacatgttgttaaagcaaaatggtcttaatgttaactggctgttaagttctaaggtcctaacattagtgaggcttttttgccacctaatgtgaatattagctcaaagataatggtgattaataactgaatatcatactgaaggctgattttgggggcaccactatatgaaagactgagcactctgatggctataaagaattttaaattgttctggtgcattttcactctttctatattattctgttcaagaacaggaggctttaagttgtatgtaggatttccctgctacaaacattgaataatttgtttgaatataaaaatatctaaatactaaaacagcacatgggaacaacataaagtcatataaattgttattgggtaccatggtctagacctggcttggcaaatagatgctctctggtgtggtggtcccaattgactggaaggggctgcctggaatgtactatttaaaggattctgagagcaagctcagagggaaagggtgctgtggttgatgaaagggtgctgtggcactgtttacaaggcactggggttaggcagtgcaatgaccgtttagagattatagtgactagtttatgttcctctttaatttttgaggcccttctaaaagcacttgggaagaccattttataattaagattaacatttatcaaaggattacctttggtcagtttgtatataaatacaaaagaaagtatattgaacatgatttgaaaactttaaaagtttatatatcacttactttttaattatggaacattaaatagccaaaagaaagataacacattttataaaaatatatgacctatagctgaaatagcaactttgtcctatctatgttgaaagtcagttttttatattatttgtgcaataattcacatgaactatttaaacacttttcatttaataggatgaatctttttccctataacatgtcattcttacctactaagcttagttcatttactttataactaatttatgaccacataaatcaaagtcataaactttagctatccgtcagataattagaggccattttaaaatatgaaaaccttgcacaataaggcacattgttttcaattgatcatttctaccctgatttacaaatagcaaatattgttttatactcaattataagcacagggaaatatgtaaaatctggtttccagtcccgccatactgtctgaactaatctaatagtaacactaaatatcaaaagtggcctcattcaatgtaattcaatgttcttgtccagtaaaaccataatgaatacattgagctccactaatatttagaaaccttctgcccccttttttttttttttttttctttgagacagggtattgctctgtcgcccaggctggagtgcagtggcacaatcagggctcactgcagccttgaactcctggactcaggtgatcctcccacctcagcctctgggtagctgggaatataggtgcaagccaccacccctggctaatttttttcttttttgtagaaatggggttttgtcaagttgcccaggctggtctcaaactcctggactcaagcgatccaccccggtctcctaaagagctgggattacaggcataagccgctgcacctggcccctctgtcttaatataaattaaatctgtcaattcaaataaagaggtgataatcattttagggaaagatccattttaatttctacatggtaatgaagcagaaatgaaaatgctgaagctttgaaacaggcaaaggtctgctcctagcacaggaacagcgctcctttttaccatgatcccaatagtgcatcctgaaagaaggaggaaaaaaggactgaagattttttttttcccagtggaactagttgtggggccaagtagaaacgcatcactcaaatgccttaaagctgggcctccatgaagataaaaaggtggaaagaaaatttgctttttagctctgatttattcataaagtgcagtaaattttcctcatctgagtatataaaggataaagaaaaaagaagctgcattgttaaacaaccacaagccagctcagattaaaggatgttctgaagtacatgattattccaaaaagggcaataaaatgtagggaactaatggatgacagtttagtatttttgagctttacaagctaacatgtatatgtacaggtgaaccttaatttgaaaatcttccttttgcacatttctgttccagtacatttgataaagatggctgcaacccaacatgtatgtataaggcttcacattacagtatacttcatttcctgccagcttggcatctcccctggaaactccaagaaaaacaacacaaaacaagaaacttcaaacaagtctgaaaaacagctagaagagtccccatgccctttccagctgggctggaaaacaagactcacaagcggcaatatcacctatattcatggctgctggttgttacttaaactgattaaattgaatgactcaaaaatatttaaaataacaactttcataagcatgacagatgaataaactgctttggcctcttcttcacttgacttctaaaactagtagtctctgctaaattctagtttaaaaatggtaaaccctgtagacagctaaacatttgatacttcaacagtcagaaagaaatgcccagtaaaatgaaaattagtattggtcttaatattgaatatatggtaatacttcccaaattgatctacagattcaacataatcaatgcatgcagggccacaagccaaggaactggggcagtgtctagaagatggaaaaggcaaggaatggattattctcataagctcaatgaaactatgatgatccaaaacactaaatcagaaattattctctcgctactaagggaaaagcttgaaacaggtacgataatagcataaagaagttctacagaactctattctgacaaagaccttttattgtcaacaatgtaggcttacccagagagcttgcccacagggtcaaacaccagtcttaaaaaaccatgcctgttggttgaagcatgttagttataaataggaatgaagaatcttcttaaacaattcaaaaacctcttaagaagatatggatgtcagctaggacgtctataaatctatgacgccaactggatttgaatcataattcaaaagaactagttctggcatcaactttgtagcctttattctcagtaagttagttttgttctgggagcagaaacaagggtgctggcagcaaattctaagatctgctcattcaaatactatagaaaacataaaagaagtgtaaaacatggttcctatcttgcaaaaactataatctgactaagggaaaagatgaaaatataaggagaaaaataaaatgatgcaatatcgtacacattaaatcttgtgacaaattttaagtgctaaaagaatacaaagaacgtaacaatgaagtaagaggctatataagaaacaattctcagaggatcaaatttatgtgtaagataggaaataaaggtatataagtaaaattaatgaaagttttaaacagtttaaagtttatgtaataattttatgctaaactaacttctgcctgtaatatgggtccataaataaaacaaactctagctcagcaaatacaaaagcaagtaatacttctatggtaaactaacaaaatattgagaaaattatccttaaagataaagcagtcatggtttatggtgaagaaaaattcctttaaaatctttaaattctttaaacttcaaaataaatcccacatatgatgctattttcgtttatgtccctatatttaacaaatgattaaaacttccatttataaattgtacaccatatatgcagagtttacatacaaactcactaatgtatttcattacagatgtagtattatatcagtatataataaggaaattacgttattcttgtaaaatgacaaaacctaaatattctggaataggtgaggaccacttcttgttattaggagaggaagaaagacagtatgaagtcactcaagcagaatgataagtaaaccaaagccagatcaaaggaataaagaaaaaaggctgaaatgtgaatctgaaatatttatttccttcaaaaacattatccatgccttgtcccagggcagttcaatatttcaaagtaactggaaaatattctcacttacattcatcactatgcacaaatagatcaaatttcaagcaggcaaattttctatttatcaaatataaatgtaatatttatcatgtgacagaagcttttctgctcattatagatgatttctaagtgatatgaaatgaaaagtcgcaatagatatgtcccactacttttagagaattgtattgctacaaaatataacatttatagtgtagccataatttttaaatctttggaaatgatgaagcagagtgaacatttgaatgtctaccctgctcatcacagttagggcagttcacatattatttgacgttatttctattagaaaagttactacattttttagatgaaaacactgaaacttagaatagttaagtgatttgctcaagttcacataaaagtgccagaacaagcgatgaaaacaacccatctgactggaagtccaaaatagtttcgctacatgtaacattatttctttaaatctgtacatacattttttattaacttaccatttcatattaattagctgaatttataataagtacttatcgtaatttatccttacatagcaatatttgtatatcaaatatctagagtatttgaaagctaaaatgttcattagcatttacttaacatctatcacatgccaagatctgtgctcagtattagaactgcaaaaatgattaagacattatatcagttttttgtttttttgtgtgtgtggatttttttttttttttttgagacaatgtcttgatctgtcaccccagctagagtgcagtggtgcgatctcggctaactacaacctctgcctcctgggttcaagtgattctcttgcctcagcctcccaagtagctgggattacaggcatgcagtaccacgcctgactagttttttttgtatttttagtaaacatggggttttgccatgttggccaggctgatctaggaaaacattgtaaaggacttctcattttgttaagatcattatgaaaaatatttaagattaacgtattacatgtacattgcataatacataccacatgcatatcacatacaagcatattacatgtacattacatgcatacacatcacacatgtatcacatgcatgtgtaatgcatgcatattacacacaggtatactgtatttgcattacttgcatgtatattgcatgtatgttacttaaatgaatattgtgtgcatgtatattacacacaagtatacacatatattgcatgcacgaatattacatgtgtgccgcatgcactgcacacatattgcaagcatatatgacatgtataacactgcatattgcatgcatgtgtattgtatgcatattacacgcatacaggaatatcacataaatgtgtattgcatgcatacactacacgaatgcttattacatgtaaatcacatagatgcatattacatgcatgcgcatcacatgtatattacctgcatacatattacaagcatatcatctatatatagcatgcatgcaaattacatgtgcattatgtgtaaattacatgcatgcttaacacatgcatattacatgcatatcacatgcgctacaggcatgcatatcacaggtatattaaatgtatgtataacatgcatatcacacgcatgttacacacatatcacatgtgtattgcgaacatgcacgccacatgcatattgcatgcatgccacatcacatgtgtattgcaaacatgcatgccacctgcatattacatgtatgcatagcacatgcatatcgcatgtatattgcatttatgtattttgcatgtgtatagcaaacatgcatattacatttgtattacatgcatatatgctgcatgcatgtcatgcatgcatataccatgcatatatgcatgtatattacatgcatgttgcacacatattacatgcatgtatgtagcatggatgtcatactgcatgtgtatctcatatgtaaaacatattgcatgcatattacatgcatgtgcactatgtgcctatattacatgcacacatcatgcatatatattacatgcatgcacacatcatgcatgtatattacatgcatgcacacatcatgcatgtatattacatgcatgcacacatgcatgtatattacatgcatgcacactacatgcatattatatgcatgcatattaaatacatgtataacacatgaatattacatgaaagttacctacatcttacatgcaaattgcgtgcattttatatattacctgtatattgcaggcatatggaatggaagcatattacatgcatgcacgcatgtatattacatacatgcatattacacgcatatcacacacatgcatattacatgcatacacatgacatgtgcctttatcacatgcatgtgttaatacatgcacattacaggtatgttacatgttacatgcatgcataaaatgtatattgcacatgtgtatggcgcatgtatattgcatgcatgcacattacatgcatatgtcatgtatatctgcatgctgcatcgcattacatgcatatcacatctgtgtgcattgcatgtatgttgcatgtatgcagttattgcacccatattatattacatacctattacatgttggccaggctgattttaaaaaactttgtaaagggcttcttattttggaagataattattggaaatttttaagaggcttgtattacatgtctattacatacatgcatgtcacatgtcttacatgtatattacatggtacattgcatgttccttgcgtgtatgagatttatattgcatgtgcacatgatacatgtacattacatgtacagcacatgtacagcacatgcatatcacattgcacgtatgtatatcacatgtatattacatacgtgcaaaacatgcacatcaaatgcgtactgcacacatgtacagcacatgcacataacaaatatgcacgttacatgtgttttacaagtcttaaaaatatattacatgtatatgtatttcaggaacacatgtatatcgcatgtatgtacattgcatgtatatagcatgtatattgcacccatgcagcatgctgcatgcatgttacatggatgccgcatgcatgcatatcacacacatgtatcatgcatgtatgacatgaatgtcatacatatcacacatgcacattacatgtgtatcacctaaatgtatgttgcatgtatgttacatgtgtgttgtatgtatatggcatgtatattacatgcatgcatattgtgtgcatattatatgtatatcccatgcatattgcgttatattgcatgcatgtcacatgcatgtatgttacatgcatattacatgcgtgtatattacatgcatattacatgcatgcataaatatattgcaggtatattgctctaacaacactaatcaaaagaaagctggagtcgtgatattaataccagacaaagcctattccagggcaaagaattttgccaacactaaagaaagtaaatttacagtacttaaagagccatatcaacaggaaacaaatgctgaaaataaaagaagcaaagacttattgaaatgcaggggtgaataaacacatgcacaattacatttcgagatttcaatatccctctctatcaataattgataggacaagtagacagacaagaataaagagctaggataactaggatttgaagaacactatcaagcagctaggcctaatggacacttatggactattccacccaatcaaagaagaatacacattcatttcaagagtacatggaacattatcaacatagactattctggaacataaaacaagtctccataaatttaaaaggattcacatcatgcaatgcatattttgtgatcattgtgaaattaaaaatcaataaaagaaagatatctgggaaatccccaaatatttggaaactaaataatgtttttctacacagcccatggaccaaagaaaaaataaaatgagaaattagaaagcattttggattaatgaaactgaaaacaaatatcaaaattagagagatgctgctaacaatgtacttgaaggaaactttatagaattaaacatttgtattagaaaataatatacaggtttcaaaacaatggcattagctttcactttaaagaacagtaaaacacaaaataagtagaagaaaggaaataataaaaatcaaaacagagatcaataaaatgggaacagaagaacattaggcaaaaatcagtgaatcccaaagctggttctttgagaagatcaataaaattgataaacctctagctaggctggtcagaaaaaaagaaacaatacaaattatcaatattacaaatgagagtggttatgtcactacagattttatatgtgttaaaaggacaagaaaccagtatcataaaagaagagaaaaaataatttttgttttgttttttgttttttgagacggagtctcactcttgcccaggctggagcacagtggtgtgatctcagctcactgcaacctccacctccttggttcaagtgattctcatgcctcagcctcccgagtagctgggattacaggcacctgccaccacacccagctaatttttgtatttttagtagagacggggtttcaccatgttggccaggctgatctcgaactcctgacctcaggtgatctgcccgccttggcctccgaaagtcttggaattacaggcgtaagccactgctcccagcctgagaaaaaatttgaatccttacttcttcccagtatatacaaaattactaaaaagtgatcaaagtcctaatgtaaaacctaaaactataaaactttcagaagaaaacctttgtgaccttgggttagaaaaagatttcctagatatgacaccaacagcacaatttataaaagaacaaatactgtaaacacagtagacttcatcaaaattaaaaacacctgctttttgaaagaaaccattaaaagaatgaacaggcaagtcacagactgggagaaaatatgcaaaaacatctatctaataaaagactggtaagcagaatatatcatgaaatctcaaaacttaattataagaaaacagtcaacccaatttaaaaatggactaaagatttgaacactttccaaggtagataggcatatggccaataaggacatgaaaacctttttaacatcattagtcactaggaaaatgcaagtgaaaaccacaataagatactactacacacttgtgagcgtggtgaaaatttaaaacactgatgatatcaagttttgggaaagatgtggagggactggaaaaacgatacatactgtctgcttccatttatctaaaattctggaaattgaaatataaggacaggaaatcagtggttgcctggatatggggaggtggaaaggggtagaccagaaggatggcatgagagcaggagagaacaagagaacgtttggggtgatacatatgttcacacgtatatcttttttgaattggtagtttcatgagtatgtacatagttcaaaatatatgaaactgtatactttaaatatgtgaaatttattgtatgacaattctaactaaataagtgtgttaaaatggcccttaaatgtaataaaatgtttaatctcacttacaagagtactgcaaattaaaaccgtgtcattatttctcacctaccagatttacaaaaatgtttaaattgtaacaacattctacttgggagtctaaaaggcttcgctgttttcttacttctttttttttttaagacagggtctcactttgtcacccaagctggagtgcagtggtgagatcacaactcactgcagcctcagcctccccagctcaagcaatcctcccacttcaaccccccaagtggctgggactacaggcacacaccaccacgccagttaatttttttgcattttttgtagagacagggttttgccatttgtccaagctggtctcaaaatcctgagctcaagcaatctgcccgccttggcctcccaaagtgctgggattacaggtgtgagcgactgtgcccagcccaaaaggcatcctccttatttgcagccaagagaaacttaagtcagtgtaacctttatggaggaaaatttgccactacataacaatactatatacatgtcattttgacccagtattcccactcctaaaaagttaccctgaatctatatcccaaacaatacaaaaattcatatccattaggttattcatgacagcatcacatgcaactgcaaatattgggaacaacctgtatacccatatgtagaacagtggttgcataaacacactggcatactacactgatgtaaaaagaacgagtgacttccaggttataataaatgaaaaaagcaatgtgtacaaaagtatccatgcctttcgtgtaaggaggaagagaaaacaatgagatatgcatgtatctgcttatttgtgcaggaacaaacacagaaatgatcaactagagactagtaagatcatatatccacagaagtggcttggaatggcaaagacaacacagaaggaatgaaggtagggtgacacctctctgaatatacctaatagtccaggtctggcgtttggaatcatattaatgttttatttactaaaaaaaaaaaaatgaaataaggacaggagagggaaattctgaaatgaactacaaacagaaacaaataaacatacttgtatttcaaatgattaataatcacactgaagggggaataaataaccaaatcaactttagaatacaatctttggatcatgtgctcttgggctgaagacgaaaagaacacaaaagaactcttagactctagttacaggtttctttcttcacagagatatggtctatcaattgaaaaaccgtttcctgctattctaggtttgagcaaataagtaaatatataatggaagtcaggtttctcacagtcagagggtaataaaacatataagaagaataaaataaactgttgaatttgactagaaatggaattagtgtgagttcatactttctatatatttagagagatatagaaatatagatgtataagtatgggatatgtgtatgatataaaaacacacatatgtaaatatataaacaacatacacaaatatatacacacacagggatgtatatgtatgtgtctatatattcatttgtttcctaattccacctgctgaaaggggctaaaagcaatttctttggaaaggacaaaaacatacttttagataatttctcagtgtcaaataagaaatcatactgaaaatcatgaactatactggaactgaaccacaaaaaatacactacatataaaaatgtgtgtgatacaacttagcatttcttaaaacaatttaaaactttaaatgcataagatagaataggaaaagcaactgaaagccttttttggaatattctgttttacttaaggtacactcaggaggagtcctaatttgggactaaacatagccttgaaatgacatggcaaaagcataacatgtggaaaagaaaggtgattatctccagggaaggagagagaaaaaacccatacctatcgtaattttttctttaaacaaaaagaatctgaaatgaatatcccaagaagttaccatttgttaaatgcgtacacgtgtgctggatgtgttacgcaatcctcccgacttccctaatttgacctataaagtaagctcttcagcgctttcaacgagaactgctgccctttcttcacacacactaatcaccatggactcggacaagcaagtgtgaacacagtgttcagccccctgcctctctccccagggagggcctattgtcagaatgtccccctcccctgcctttacaggctctagtgggcggctctagctgtgacctggtgagcacatttaatctaatgagaaaggattcccaaccttcacctggccacacacccaaaccacaacttcatctataggattcttctatcttcctgaatgtgttctaaatttgagaggggaagagcatgttatttattggccttgactgtctcccaaatcaaaaacgttacccttttttttaggttctacacaaatttacaataactagtttatagttgtttatagtagtttataactacagaaaaaacctgaaatgtattgttcctaataaagcagcaatgtcattaattttattttcatgaataatcttccttaaaatttctaaggaccctatagaagtatgccatctgcatactaattcagactttgttagtaagaatttgtgataattttgacaggggtgagatattaaagttcacctgtatttgttcttaaaaagatctttttaaaaaaatacatattgtaataacattatataggccatatttaatctattttttaaagtaaacttataactttttctttttttttttttttttttgagacagagagtctcactctgttgcccaggctggagtgcagtggtgcaatctcagctcactgcaacctccacctcccaggttcaagcgattttcgtgcctcagcctcccaagtagctgggattacaggcatgcacccccatgcccagctaatttttgtatttttagtagaaacagggtttcaccatgttggccaggctgtctcaaactcccgacctcaggtgatccgcccgcctagggctcccaaagtgctggaattacaggagtgagccaccaggcccggccactttttaaacaaatgtttaaaatgccttttaactcatggtaaccaaataaaaacagctgtatattataaagacatgagatctcagcgaaggtgtctcttgagatggaactggaataaacgagactctgctatgcatggttgcgtttcttacagcatctgtgcttctctttgtgcatctgccccgctttcctcttggcatcaacacaactactcgacactttagcttgcgtatggcccgtagtggctgcctagtcaaccttcctcatagaaacgttccaggttttcagcttctgcattgagtcagtctcgcagttttccagttccgaattcccaagcttcagggaagaagagcaatgcagtatagcacagtggttaagaatagaggctttaaagtcaaacacacacaatttcaaatcctggcacctccaccagctgtgtgacttaagctctttgtacctcagaacaaaatgatgcggctgcctttggatcaggtgtccactctagacccaatgaatgtggcagagaagggaagatggtcctatggcagagaacatggtgggcagcagtcagagctgtgggcagggcagattccccaatgtggggttaagtgaggaataagtggctgagtacagtggctcatgcctataatcccgacactttgggaagccgaggtgggaggatcccttgaagccaggaatttgagaccagcctgggcaacaacgtgagaccctgtctttaaaaataaaaataaaaaggccaggtgcggtggctcacacctgtaatcccagcactttgggaggctgaggcaggcgaatcacttgaagtcaggagttcaagaccagcctggacaacacggtaaaaccctgtctctactaaaaataccaaaactagccagacatggtggcaggcacctgtaatcccagctactcagggggctgaggcaggagaatcacttgaacacgggaggtggagtttgtggtgagcagagatactgccatcacactccagcctgggggacaagagtaagactttgtctcaaaaaaatttttttaaataaaaaataaaataattagccaggcatggtggtgcatacctgtagtctcagccacctgggaggctgaggcaggaggatcacttgagcccagaggttgaggctgcagtgggctatgatcatgccactacactccagcctgggtgacagagcaagatcctatctctaaaagaaaataagtaatgacatatctagtatatgttgccatctttgaatgatttggatccaatcatttaaaaagcacaaaaggaaaatactttggtgacataaaggtaaacattggcattctatcaggaaaagagcaatgaagtaggactcggtgtgccccggagcaaggcccagctcggtcacgtgccaactttgcaatattggtcaaattgcttgaacaatcggtgaaatctctatgaacctcagtttcttcctttcaaaatgcagataataacaaacagccacataggattctttggaggataaatatattaaaaccattttgttaacttgaaaacactcaaggaagtattattgtcctttattagcatattttactccccataagggttacatttatttcacacttcattgctaatgcaaattttgactgcagtaaaactcaagaagctaaatatataaactgctaaaaaatgggttttgcaaactcaattcctaaggaaagcatccaagaaatgtaaaaatatgttccaaattaaacctgttgtgtgaaaatgtgtcaaaaatgtctctgtcagtagaggcctcttgaccatcatattctactgacactcatttaaagcagtatgtttttgtgagaagtgctgagttctctaaagacatatctacaaagaaatacttcacagaatgaaaatttccctctcaactggaagcaaggtaaccacacattgctctcttctcttcgagctttacattgtgcttcttggagggttaagccagcatgttcactggagcaaaggaatgtttacaataaactggaaaccttgcctgctctggatctaaaatggttgcagatgctcaagcagagaggagaaaagagaacagctgctccccacccccaccattgatacttaagagagctatttttaagaagaaaattatattcagaggttttaggcattttgtttatttttaattttatttatttatttattttttgctttttgagacaaggtctcactctgtcaccctgggtggagtgcagtggcaatcagttcactataacctcaaactcctgcaatcctcccacctcagcctcccaagaagctgggactacaggtccacacctctacgcgggtctatttttattaaaaaaatttttggtaaagatagagtctcactatgttgcccaggcgtgtcttgaactcctggcctcaagcaatcctcccatctcagcttcccaaagctctgagatgacaggtgtgaggccactgtgtctggccttaggctctttctaaatggtagggataacttttctcagtatcacacaaattattatatcaatacaaaactgaataccttaaatgtgcctaccagaaaagaatgtaaattcttgttattgccttctagtaatttagctattattttcaacttaaaacataacgattccagttacaagaaaagcaaactattatattcccagtaaatttagaaaattattaaaatgaaacatctttaatatataataaacatatagtcacatcatagccacaacctgcaaaatgaatgagtacccaatatgggtaagataaaccttgcatgatgaattggaacatcctctggtaaaaaatagtttgaaactattaataatagtttcaaacgctatcaccattctaaactacacgatttcgtcataataaagcaagctaaggaacaattaacttaccaagtaaagaacttaaaatgtttctaattataatcacataacaccccattaaaaaagaaaaagccaaatcaaagaatcagacatcaaaaggccattaggtctctcgatacagaccatttccagacctagtttactccacataaaactccattggggcgttttcatttttcactaagaatagagatatatggttcaaattactgtttcttcaaagtccctcgacatttgtgtattctacaactaaaatgaataaattttatatcaagtaataaaaaacttgaggattcaggctttaacagtaaccagttttaaaagaccattgttaaaattcatgacatcaaacttcagggactatgatttaggaaggaataaaggaaattcaatgaggaaataaacacaagtttttgaaggatagaaatgtttgacatttatttatctattgtttattataatctgacaaaatctttcttccagaaaattaggtctgtttgctgtacctctaacctcatgcttggacattaatatggcatcagactcatgcccttggaacatgttattccttctggttggaaaattctctctcctccaccagtttattttctgtcccttccttcaaaacttagcttattggcaagaaatattcagggaagtaagcttttctccaatgtcactttgatcatatactctgttaccaattcttcaaccattgaccatttgggggaatttaaggtctccctcaaaatgtaccaccaggctctgcgctttctgttccagctggctcatcttctcagcttttttttctttttttgagggggacagagtctcactctgtcacccaggctagagtgcagtggcacgatctccactcactgcaacctctgcctcccaggttcaagtgattctcctgcttcagcctcccaagtagctgggattacaggtgccggccaccacacccagataatttttatgtttttagtagtgacgcttctattaaagaaatgtctttagtagaacatggagaggggtttctccatgttgaccaggctggtcttgaactcctgacctcaggtgatccacccgtctcagcctcccaaagtgctgggattacaggcgtgagccaccacgcccggccatcttcttaggtttcttcacatacacccttgcactctccatctctacatattagttcatgatcttctaacttcctgggtaattttactatatggaagaataaatctatagggtatacaagccactgtgttcaggatataacttgggaacaccattaggaagagatctactattaaaattagtaccagattaacagttaacttatggaaatttattacttatgaaacttattttctgagtctctatgaagaaaccagcatattcgatagctaatagccaacatatctatgagaagtcaccaacatggaagatgtttttcctatatttcagagcactatttaattttgctttcttcctttaaaatttaacacacaggcttaagtccaaagtgaacctaattgaggttgaagaagtattgtttcggtatggctgatcttttctcagtcgtggtttttgatttttttgtttgtttgtttttgaaatggagtcttgttctgtcacccaggctggaaggcagtggcacagtctcagctcattgcagcctccaccacccaggttcaagtgattctcctgcctcagcctcccaactagctgggattacaggcatgcgccaccatgcccagctaatttttgtatttttagtagagacggggtttcgccatattgtccaggctggtctcgaactcctgacctcaagtgatccatctaccttggccttcaatcatgttttggttgtaaaacttcatttatcattgtgattggcactattttttggatttgcaaatatataaaaaaatttaaaataaatacataaatgagctgctacaggaaaagatggcaatactgacatagtaaaaatggccagcaagtataacaacctaacgatttattgtaactttctgggtataagataatggtgtttttatttactatatatttttaaatatttttctttttaatttttgtaggtacataataggtatatatatttatggagtatatggaatattttaatacaggcctaatatgtgtaataatcacatcagaggaaatggggtatccatcacctcaagcatttatcctttgtgttacaaacaacccaattatatgctattttttatgataataactatacatggatggatatggaaggtaaaaattcgtcagagtgcttttggtactgattagcagagaaaaatgtgctttatgatagctggcataagacatacaggcaaaatatccccgaagtagagaagggcaacttgcccaacttaactgcttatcctaactagatagaaacaccatttaagaacacacaattctcttagttataattctatgattatcagacaacatttcaactgatggtttgaattcttgaacagactagcccactagaaaaacatatttttatcaagtgcctggaaaccctttaaataattttcaatggcttttctccttttgtgggcgatagctgcagttccaattagggtaaaagggaaatgtgtgtgccaactgccagagtattattttggagaccaatactgaaagccaagtatacaaacagtaagctgtcccagcaattccactcctgggtatatacacaaataattgaaaataggtactcaagcgagtaattatacataaatattcatagcagcactattcacaatagccaaaaggtagcaacaacccaaatggccatcaatagttgagtaggtaaactaactatggtatatacacacaatggaatataattcagccatcaaaaggaatgaagtgacaatatttgctgcactgtagatgaacctagaaaacattacactaagtgaaagtagctccggacacaaaaggtcacatattgtatgattccatttctatgacatatccaggaaagataaatccctagagacagaaagcagaatggtggttaggaggatctgacagaaggcggggaatgggaatccactgcctaataagtataggattttatttgtgatgatgaaagtgatctggaactaaatagaggtagtcattgcacaacaacgtgaatgtactaaatgtcactgaattgcttactctaaaatgtcaattttatgttatgtaaattttacctcaatttaaaaataaatgactgtagctgtaactgtggagcaggagtccaaattcaaatgcctacaggggccaactaacaaaaatgaggacagtgaaccaaagaccgcacgcccgccatgtaattatattcctttaatgttgtttaatttttgccttttagtcttttatatagttgggatatgtgtcccctccaaatatcatgttgaaatgtgaccttccaatgttggaggtagagcctagtgggaggtgttggcttatgggagtgactccctcatgaatgtcttggtgtcagtcccttggtgatgagtgggttctcactctattggttcatgccagagatagttgtttaaaagagtgtggcaacccttcctctccctcctgctccgtctcttgctctgtgacatacctactccccctccaccttctaaccatgagtaaaagcttcctgaggtcctacaagaagcagatgttggcaccaagcttcttgtacagtctgtagaactataaacctcttttctttataaatcacccagcttcaggtattcctttatatcaatgcaaaatgaaataaaggaatcagagaaaatggagactaacagtcttttctccgcttttcctgaccagtctaacagagacctgtttaatttgttcacttattttattaaattggttttgttatctctctacattgtgtttctgatttcactgatctctgctcttagttttactatatttttcacacttactttgttgctttttatctagtgttttgaggttaaggcttagcttatttcagtctagataccaatttaagatactctacaacatttgatgagtaatgctatcattatctttcagttttaaatatttgacaattttattgtgattttctttttaaccataacttatttaaaaatacaattttacatttccaaacctaaatccaagggttttttttaaactggctgcttattattgatttctaatttgattgcacagagaacataaaatgttgtctctatgacagtgatactttaaaggcagttgtgacttctaatataaccaatcagttccacttgttgccttgacaaggcaggggtcagtggtgccagatctcacatagttcaaaagaaactagaaatctaaaatttatgtgaaatcttctgattttataatgttggcaactaattgaaaattttcgaaacgttgcacaggccaaactaaatatatatgcagatgactcaacctgcagcccaggaatttataacatctgctggaaagcctgaacctgaacagaagaccgacaaaacagacaagaaaaaaagcacaaaagcagcaaagataagagtaagctacaggagaatattatgaaagaaaggaatggcttatatgacacaatcctggaactctgcctaacacaaattttaaagtagaattttaaaattggaacatacataaaaatattaaaatatcatatattaataagtgccataaagaaaattaagcaaatagcccaaggccaagatacacatttgtatagcattgctgtaaggatggcacagaatgatagttactgaagctatactttcgaactggattgtctcatgaaataatctagagtaagacaagagtaggatgaacatgcaaaaaagaccaagagggatgacgaaaaccaaaagaatgtgtgccacagaaaatgaagaagaaaatgtcctgaggaagaaagactgaacaaaatccagattggaggtcactggtatccctaggaggagaagttttggtaacatcagggaataacccaaactgcattggcttgaaggtagatgatgagaaatctgaggcaatgagtaaaataactccttaaagaaacctgaatataaaagcaaagaaagagagagaagccgcagttgaaggggttggagtgagattaagaaaaaagttttaagatggatacttactcatgtctaagtgttgaaaggaccaatgtagttaagagataccaagagggccctgaattagacttcaaaatggaggaagatgcaataattgtaagaggaagcaaagaactggtggaaggattggtacaaagaaaacaccctataaattaacaaaatacaagaaggcaagagtttaaaagaagaacattaatgaaaccagaaacaatattttggcctggagtcacaagaatagaagtagtatcacttttacatctaactagtggtggatgacaggagaggtagaggaggaccacttgtcagtctaaaagtgatggctaaggttttactatacactccatgaacaaatggtgccaggaataattttttaagggataaaagcttcagaagaagttgtctatggtctactatattaataaagcatatattcaatggtgtgaaaaatcaaagaaccgttcatgacaacagagaaaatgatgatgtttctggagtaaaagaaaaaccatttgggagatcatgagtcagtctttgattcacttattaattttgtagaaagctaaccgtgttccactgctcaggaggtcatacagctctgcatgcctcactccatcctcttgaagatgaggcataagaccacaaagcaagctgagatcaagggcttttgttttttttttttttaagaaatcaagtttcaaagtaatggaaaggtcagtgtgcatttagagtttaggcctacaaactaatctgtgattgaatctacagcaaatcacgataatttattccaaaagtgatgatgctgacttatcctaaacttatccattatgcaactgtaaagagaattgaagtaatagatcacatttcaaaaagaatcctatcaaaaaatctcagtaagaatagctctaggtttcatagataaaatgatatctggctaacatctctccaatagtctcccccaagtgctcactaaaatacctagaaagagaaagggggaaaaaaaataaaacatcgcaagaacagtaataactcagataaacagaaaacacagtgaaagaacctgggcagaatctccaacaactataaagtacatggaaatagactaattaaaaatatatctatacagatctacctgaaagcaaatgtaaattagcttcaggaaacagaacctaagaaaaattatataggaagacacattctacctccctcaagtcaaagattctgtgttgaaaaaaatcaaaatatttactatgtgtgattcttctatgataatgctttttccttccatggtggtacgtttttctaacatctactagtgtttcacacacaatcattcagagccagcaactcccaaaatgcatcggattaaagtaaagtacaaatgatgttggtgtactatatgtagggagccatcatctccacagctaaaggaatatacttggacacaaaaagagggaaaacaatctgagttcaaaacatactgagaactatacgattcattatttcattcaaaaaatcaaagacttataatataagttataaaaagatatatcactagtaaagcagagtttctacaggtaaaataatcctagaaactgggaacttcactggcagctgaccaatgtttttatccacctgaaaatcttcaagagaatatgaccattatacaagttgacatggagaagacacaagacaatccatacccaaaatacacagtagactaatatcagaaagtccctagaaaagtgtacaaacagtgagagctcaacaagtgtttgttaaataaacgaaacaccaagactttacaaaatctcccttattcattattgagtaatgagaaaaaaataccagttggagactaaaagctattgtagaaccaggggaaaagaacaacatcctataaacacagaataaaaatataccatcaaaataatctaatatccagaagaaaatatcagaaaagtatgaggaatcgtaaagaagaccgtctctatgaaatacaaggtaaaatcttaagaattagctaagacaaaaagagaacagaataatatttaaaaggggatatgattaagatgaaaaatagaaaagaagcaaaaatgcagagcacaataaaaattcataatggaagtggcaaagagcaaaaatgcaaatcagtgatgttgtaaaccatcccatatactcagaggacaaaaacaacacatgaaaatatgagaaagaaactagaaatatgaaagaatgataaaagagctacaaaagtgaaaatggaaaataaatgctaaaaaaaggaaaacaatattagaaataaactaagcttaaactttttaagggaaaatttaaaatgttgatgtcttactgtatcctagcacaaacagaaaaaaagagaattacatctgattcagatttctggtttcaaaatggcggcatagaagctggcttcactctcccacacagaaaaccaaaaacaaacagacagcactgagattatcaccagcaatatcacagaactcaaatatgagaatgaggcagttcccaggaccacagggaagtaaaaaacaactctgagcagagagtaggagaaccacacttccatgtatacaatgtccctcccctccaatctgcccaggcatacagaaaatttcccctcgacccagagtttccacactagaaaaagatcaaggtggacaaccagcttctccaacatattgggttccctggcagaggacctgtctctgccttaagccacaggaaacattgtgagttcctgaagggagaaatattcctgaggatagccagagacaaagggagaggtgagtctatcattctcagtcctggaaactctgttctgtaacttggccaaaaaagacaccaaatcagagtgactgttcaacagcccaggtcccctaggcacaaactcctaacccgccttcccacactactaggatatcccatttaggactttccatattcaggacaggtggcactctgattgtttactagaaccaagcaaaacctgggcttaaggtgccatctagtgacaaaaaggaggcagtgatctagcgagataagaaagaaagaaatcaacaaatcaattataatgaatcactaaagcaaacatatccaataaaaaacaaaacaagtcaggcaaggaaaactgaataaataactaatccttcaatgcaaagacacagatgaacatcctcaagaaacaacagcaaacaacgaaccatgaactcctcaaagagacagagcaaggaaccagcaactgactagtatgaaatgatatgtgaactctctgaccaagaattcaatatagcatttttaagaaaactcagtgatctccaacataacacagaaaagcaattcataaattatcagagaaatctaacaaagaaattaaaataattgttaaaagatcaaacaaatcttagagttgaaaaatacatttgctgaactgaaaaattcatttgagactctcaatagcagaatggttcaagcattgaaagaacctgtgagcttgacaactggctacttgaaaacacacattgagaggagaaaaaagaaaaaagaatgagaaaaaaagatctcctacaagatacagaaaattatcttagaagacaaaatctaagaattattggtgtccaagagggagttgagaaacagtgagaggtagaaagcttattcacagaaataataaaagaaaactttccaaaacttaagaaagagataaatgtccaggtacaagaaggtaagaaagcaccaaacagggccagacgtggtggctcacgcctgtaatcccagcactttgggacgctgaggcgggcagatcaccaggtcaggagatcgagaccaccctggctgacacatggtgaaaccctgtctctactaaaaatacaaaaaaattaaaaaaaaagccaggtgtggtggtgggcacctgtagtcccagctacttgggaggctgaggcagaagaatggcatgaacccaggagtcagagcttgcagtgaaccaagattgcaccattgcactgcagcctgggagacagagtgagactccatctcaaaaaaaaaaaaaaaaagaaagaaagaaaaaagaaaacaccaaacagatttgacccaaataagactatcccaaggcctataaacattgggcactcaaaggccaagacaaagagagaatcctaaaaggagcaagagaaaagaagcaaataatttaaagaagctccaattcatttggcaacagacctctcagggaaaaccatacagcccaggagggagcaggatgacagtttcaaagttcagaaagaaaaaaaaaactgtcatacaaaaatgctatatacagcaaaactatccttcaaatatgaaggggaaataaagtctttccctgacaaacaaaagctgagagaattcaccaacaccagaaccatcttacaacaaatgctaaacagagtttttccattagaaagaaaaaaatactaacgggcaaaaagaaaacatttgaaggtaagaaacccactggtaaaattaagtatatgaacaaacccagaatagtctaatactgttaactgtgctgtgcaattcactcataactctagtatgaagccaaaaagacaaacctataaaaaacaatactacctacaggaacctgttaagagacgggcaatataaagatgtgtaattgagacaacataaagtctaaatgtggagagataaagtatgtaagttttttcattttttgttttttcctatactttgagatctaagataaattttcatctctttaaaataacttgttatcgctataaaatgctttttgtgagcctcatagtaaccacaatgcaaaaacctataatagatttactaaaaataaaaagcaattaattaaaacataccaccaaagaaaatcatgtaaccataaaggaagaaagggaaagagaagttaccaaacaaccagaacacaaacaacaaaataataatatttaagtccttactgatcaataataacattgaatgttaatgaactcaattctccaataaaaaggcatagagtgtagggcagagcaagatggctaaatagaagcttaagtgattcttcccctcaacagaaacaccaaattttaacaactatgtataaaaagaaccatcacaggaaccaaaactcaggtgagcaatcacagtatctacttttaatttcatatggctgaaagatacatcaaagagggcaggaaaaacagttttgaattgctgatgccactcctcccccatccaccagccagatagcatctgtgctcttgggagaaggagagcacagagattgtgaggctttgcattgaacttagtgctgctctgtcatggtggaaaagagaaccaggctgtagtcagctgacatctgcctgcagagagggcacctggactggcccatgcccagaggtgaaccgctcatcccaaaggtcagaacttgagttctagcaagccttgccaccacaagctggagtgctctgggaccttaagtgaacttgaagggcagtctaggccataaggactgcaattcctagggaagtcccaatgctgagctgggctcagagccagtggactagaggggcacacaacctactgagacaccagccagaaaggctgaagggaatgcctgtatcagctctcccaagccctgggcagtggccatctggcatggagaaatctgtgtgcttgggagaggaggagagcagcgactggggaacttcacattgaactcagtgctgccctgtcacagcggagatctggcaggattcatcacctgctaactaaagagcctctggtccctgaataaccaacagcaatacccagataatacaccttgggcatcaggctctgagatgtcctggcttcagaactctggataggttcattttatcacaaccttctattacaatggtatacaaaataattctcttttggattaccctagaacttgagtggccacgacaaagaataaactttttaaataatttaactataatataattcagcaatttctggttacttttaatcgaactttgatataattcattgaattctaggtaagtggaatccaagttgatttcatacatgtcaaatatttccctcttgctccccaactctatacagtatctatgttgtgagaggtaacgttatactcatatatgaaaatctgacatattttggttgaatgatacgttataaattgcatgtgttcctaattttagtaatagtagcaatagaaaaaatatattcaaaagttacaaacttaattaatctttaaatatatatgcatcagttaaaaacagcaccatatcttctttattaagtatcataagttataggttacttttatattctggtagaatagtatttagaactaatctttcaagaatactttttgaaagttcgaatttgttttctaaacagaataaaatttcttatgaaggagaccctacaaaggtgttttcacttacatattaggtacagaaatctttgtgtttactattcaagtttgcaggcttccttttaggctatttctagatgtctccttaattcaattttttttccattttaaatattactattaatttcttgagatatttttcaccaaccttacaaacaaaatgatcaagtcacaattcctcactttggcaattttaaaactaaattcagatttatactattcagttatactttaaaatcccatacaagaccaatttaacctagctttccctgtctaccaaaattcaaaattcaagctcctaggtaaactggaaggctgtctgcttttaatacaacttcatccaaatttttgcagtaggcaatgttccattaaaaaaaaaaacaaacctaatcaaaatgaagttcactctttctatgaataatcacaagattgtttagtattccatttaagtcttttattaagattagcgtctagcaaataaaagtacaaaaacagtcattatgactttgcagttttagtatctttaaggtattcctatttgaagattaatccctatttcccctaatattataaatgttgatttataacaacaaacaagcaacaaaagataaatgaagaagatttaaaagtgtcataggaaagctttttcactcatgtttaaaaatataacttctttaaaaatataactttaggggtaaataatgtttttccactgtaatggaatattataaaaactatgcatattaagcaagaaaagatatgtttccaagaagctatatgtcagtttgttggaaaaataacaagtaaaagtgaagaaaggcctccaataactccaataacttcttccctttggtctcaaactgactgggttcactcacttctattggttctttgataatgccaatgaatagtctaaaatttctgcttactccagggactgaattaggtacagaaatctttatgtttactattcaagtttgcaggcatccttttaggctatttctagatgtctccttaattcaattttttctccattttaaatatcactattaattccttgagatatttttcaccaaccttacaaacaaaatgatcaagtcacaattcctcactttggcaatcttaaaactaaattcagatttatactatcccgttatactttaaaatcccatacaagaccaatttaacctagctctccctgtctaccaaaattcaaaattcaagctcctgggtaaactggaaggcttaattcttcccacatatgtgtattcttttttgttttttatttttacttttaagttcgagggtacatgtgcaggatgtgcaggttagttacatatgtaaatgtgtgccatggtgatttgctgcacccatcaacccgtcacctaggtattaagcccagcatgcattagctatttttcctaatgctctctctcccccacctcaccccctaacagggcccagtgtgtgttgttcctctccctatgtccatgtgatctcattgttcagttcccacttataagtgagaacatgtggtgtttggttttctgttcctgcattagtttgctgaggataatggcttccagctccatccatgtccttgcaaatgacatgatctcactgctttttatagctgcatagtattccatggtatatatgtaccacattttctttatccagtctatcattgatgaacatttgggttgattccatgtctttgctactgtgaatggtgctgcaatgaacatatgtatgcatgtatctttgtaatagaatgatttatactcctttgggtataatatgtgtattcttaacaaaacataaaagcatgatgaagatatatacccagcagaagtgtgtatatttagttaccaaaagaaacatataagaatgttcattgcagcactattaataatatccccaaaccagaagcagcccaaatgaatattgacagtagaatggataaatatatggtggtatattcaccttgaaacactattcaacaaatgagcatgtaaaaactacaatgatacacaacaatataaatgaatctcacaaacctaaatattgagcaaaagaggccaggcacaaaaaactgcattctgtatgattttatttatgtgcagttcaaaaatagataaaaagtgaaaatagtggctgctcttgaaggtggggcagtgacggttaggggcttgggagggaggcttctgcaatgctgttaatgttcagtttcttgatctaggagctgcttacatgggtgtgttcagtttgtgtgctttttggtatgtatgttatacttcagtagaaagttataaaaaccatgagactgcaggataagtcccctcaataaacttcggttcataggaaaaaaaaaaaaaactgcatggagtcagaaaaggggtgttatatgtcaatatcagatacatatgagcagaagacatctccagttcatggccaatacggcttgtggctagggtgttttctaaaacccataatctgagatgaaataaacatcctaatctgggcatgacagtaagatttcaaaggacaggattagtgcaagtctagaaatgtcaccatgcactttttcccttgcatagttaggctttcattgagttgaccacatatgtggtttacctctcaatctgtgggacctcaaaacatcatttggcttctttttgttgttgttattgagacagggtcttgctctcttacccaagctggagtatggtggcgtggtcatagctcactgcagtctccaactcctgagctcaagcaattctcctgcctcagcctccttagtagctaggactatagaggcatgtgccacccagccagctaatattgttgttgtttttagagatggggtcttgctacattgcctaagctggtttcaaactcatggcctcaagcaatcttcctgccttggacttccaaagtgctgggatttcagacatgagccattgcacacagccctcatttaacttctaataggaattttgtccacaacgtacagaaaaatagttctaggagaataggatgtgggggaaaataggaaacacacggagagccaaacatgtaaaaaagaacacactcatggcacttccttgaaaggaaaagaacattccagtttcaacactccctgtcaagtgattacaatactaagtgatcatttggggcagttcatttgtatccctgcctgctgtggggccactttcggttctctttctctctctggtgccattggcctaatcacaagtgagaatgctgcctctaagggctccaccatcaacccctgaactaaacatctttcatgtgccccttcggcacactcattacccttttgcacccagttctgtgccccaggggtgagtccctttgatctccatcaaacccgaagagctcccttgcctttgggtttcaagttgaattcagcaaggagcctgatcatcagagtcccatgttgttagggattaaaagaaaatggaaaggctgaagagttcttggagtggggtggggtggggggtggggaggcaagttttattccccattcctctcggaattctaacctggctttgattgtttttgttcttccttccttggggacaaggaagtgggtaaatttatcttcaaagattaaaacttcacaaaatgttggacaaaggagaatgatatacagaagtgctcatttcaaaaaaagaaaaggcaaaactggatcctgttcaaatagacatctttgatataggtgggaaaatagaagagggtacacctagatgttctccagatagcggctcccttggctgaggttcaagtatagttcaaaatctactgctccatctctggtccctgatatgtctccagttagagcatcaaaaagtcacccaggacaagtgctcttgttctagggcccacccagcacttccctcagtgggcttattcagtcctcggagcattctgggcatttagtaggcaatacaagaaacagcaacatctaaaaacaatttatctctcaagttttattgaaatttctcttttacaaaatgtctgatttttaccctaacgactgcatcctcacccaaatctcatcttgaattgtagctcccataattcccatgtgttgtaggaggggcccagtgggagataactgaatcatgggtacagattcccccatactgttctcgtgcagtgaataagtctcacgagatctgatggtttacaagggaaaactcctttcacttggctctcattctctcttgcctgctgccatgtaagaagtgcctttcgctttccaccatgattgtgaggcctccccagccacatggaactgtgagtccattaaacctctttttctttataaattacccagtcttgggtatgtctttatcagcagcatgaaaacggcctaatacaattcctaaatattttttcatcatggcgtgttttgactcaaatcctacaccatggggaaaaatatacgtgtgtgtgtgtgtgtgtgtgtgtgtgtgtgtgtgtgtagtacaataagttaaattccagtgtttcaaagtttttaaaatcattatatttgtatctttataaatcatgaaacagtatttaaaaattcagtatttcactaaagcccaaaaacccccccattatgcagtatatccatgtaataaacctgcacatgcaccccctgaatctaaaagaaaatatttttaaaatcaatatttatacttcagatttccatttactcaatctatgttatatctatatgaaacaaaaatataaaactatgcagcttttcatcagctatctcttagaaattatttgtcgaagtttattaactgtggaagaaaaggtactcagatgagactggagagttccagagaagctccttgtcctggcacatctgatccgctgtggctgcagccaacctctccatcacgggctcaccactgtcccagagtccactgtctcttacatggactattatgatagcttcatcttccttattttcctgcttccactttctcattacttaaatttatattttcattcctgccaggataatctccctaaagtatagttcattcatgatatttacttaccctgaaatgttaggatatttaggaatcaaaataagtatgctaaaatcagattcaagtttacaaagtaagattgataaattaaaagtagaagatgaatctatgtatttacacatgaattcacacaagaagaaagcctgaagcctcttacatggagaatactttttcttttcattaaaaaatcctggatgggcacggtggcccacggctgtaatcccagcactttgggaggctgaaatgggtggcttgcctgagctcaggagttcacgaccagtctgggcaacacagtgaaacctcgtctctactaaaatacaaaataaattaggcaggcgtggtggtgtgcacctgtagtcccagctactcgggagactgaggcagaagaattgcttgaacccaggaggcgaaggttgcagtgagccgagattacgccactgcactccagcctgggcaacagagtgagactccatctaaaataataataataatcctaattgtacacttattagaaagctctctttcctattctataatccataagcctcctaacagcatctcttaacaggctgtggtagggtgtcctttcattctaggcgagaaaaactctcacctgtttaaaaacaaagtgtgtcatccctgacaactctccatttattatatgaaatacacagaaggctgttcagtcaaaaactcaaaatagagttttagctatttccagaaacctggtttacactctgctccactccttactggcttaagtgatttgggacaaactgaaagcatctcaggaccttgaggaatcctcagacacgtttaattaaaaatatatgtaaaacataaatacaatttttaaaacctcatatgcttcccaactagggtgaacatacaatatttaactactattaatgttttattataatttttccttctaaaactttattggtttgtctttattattgtcataagctataaaacatacatatatatgtatgtttttatataaatataatgtctagatccctttcaatgcatttatacacacaccctaaacatccccccccccacacacacacacaatcttttttctaaattcactcttgtatcaaagttaaaatattggaaagcaaagtaaccaggaagcaacatattgaggctaccttagcttaggtctctacaatatgccaaagcacatcttaatataataactttcagcttttattgaaagtcaaaataagaaatagtctgcattttctgcaaaatgactattgaagatcttgtcagaaaaaaacaatcattattttattttaaaatttggtgccatgagagatctttttggggtgatagaaatgttctaaaattgtgcttggggtggtggctcacacctgtaatcccagtattttgagaggcctgaggtggatggatcacttgagctcaggagtttgagaccagcctgggcaaaatggtgaaaccctgtctctaccaaaaatccaaaaaaattagctgagcatggtggcacatgcctgtggtcccagctcctcaggaaactggggtgggaggatcgcttgagcttgggaggtcaaggtagcagtgagccgagatcagcccactgctgtccagcctaggtgacagagtaaggcctcgtctcaaaaaaaaaaaaaaaaaaaaaaaggaaatgttctaaaattgaactgtggtgatggttacaaaacacagaactctgtgaatttactaaaaatcatatattgtgcacttaaaacaagttatttttatggtgtgagaattgtacctcaataaagctattttctttaaaaagaaaaaaaactgatgtcaggaaaagattacttcttctggaaaacctgttcatatgattttataaggcaatgagaaactaagtaaacagagctaatacacgtatataatatagtcgttataataataatattaataatacatatataacagacactattctaaatgctttatattaactcttctaagcctctcaataatcttagagggaacatcttattatcttattaatcatcctcatgttatagatgtaaagcctgaatcacatggaaattaagcatcatgcctaaggtcacacagtaatttaagctagaagttggacggatgacaaccgggtccagagtccatgctcttaacccacactaaattcaaactgttcccaaaaccacctaaaagagttcaagtcaaagcaaatttagaatttaaatacagaaatacttttatatctagtataataatatctaccattctccacgtttgttatattttaattacatgttaatatgtttacaagtcattttaagtctgttctagaagtaaagacaaatattttattcatcatttcttataatactttcactgtatcagtgttttataaatgcaagaaatatttacttgctgaaatgaactccaatagaaattactaaattctttttttttttttttttgagacggagtctcgctctttcactccagcctgggctggagtgcagtggcactattcggctcactgcaagctctgtgtcctgggttcacgccattctcctgcctcagcctcctgagtagctgggactataggcgcctgccacagcacacggctaattttttgtatttttagtggatacggggtttcaccgtgttagccaggatggtctcgatctcctgacctcgtgatttgcccacctcggcctcccaaagtgctgggattacaagcgtgagccaccacgcccggccagaaattactaaattatttttcctatatttactcattatttgagtgatataatcctgaaagcattttttttttttacttaacttttaagtctggggtacatgtgtagatttgttatataggtgaacttgtgtcatggggtttgttgtacagattatttcatcacccaggtattaagcctagtacccgttagttatttttcccgatcctctccttccttccatcctccatcctgccataggacccagtgtgtgttgttcccttctatgtgtccatgtgttcttatcatttagctcccacttatgagtgacaacatgcggtatttggttttctgttcccgcattagtttgctaaggagaatggcctccagctctagtcatgttcctgcaaaggacatgatctcattattttttatggctgcatagtattccatggtgtatatatatcacattttcttcatataatctatcactaataggcatttaggttgattccatgtctttgctattgttaatattgctgcaataaacttacatgtgcatgtgtctttataatagaacacgattttctattcctttgggtatatactcagtaataggattgctgggtcgaatggtacttctgcttttaggtctttgaggaattgccacactgtcttccaatggctcaactaatttacactcccaacagtgtataagtgttcctttttctctgcaacctcactggcatctgttttttttttgtctttttagtaataaccattttgactgtaagatggtatctcattgtggttttgatttgcatttctctaatgatcggtgatgttgagcttttttgcttttttgcttttttttttaaactgttaagaaagtgtttgtggttttattgtatcatgaggcattgaaacatctgaacaaatcaatgtctgggcggggtgaggcagctgctttctccttcacttctttggattactagagcaacttgtcagtagattaaaaaaaaaaaaaaaggataaccttttgcattacttaagtctttccaaggcatgcactggtacaacacaaacttctcccgtagatggaactagtctagcgtccaaacatcatgcataacacttcggtggcagcagagcactgcgcccactctcaccgtggtgctgctcatttgtgcatgatatttggagcatctggaggagcaggaatagtattgggaagaggagggaggaggaaacagcatgtctggctgagaggaggtcagctgaagttgtgcagggcaagcctgaacatgtcattggtgcaaacccaagcatcgttgatgttctttaataggaacatctggtggaaccccatgatggggtcttcatgtcttaagctggtccacaaccatgctgatgatgcagctatctggcatgggctgatcgtcctgcgctgtgatgctgtgctggattttctgaaacggaaggctagacaacttctctacaatggcagctttccatggaactgttgtccttcccacataaggcatgacacgtcaatgtaaattgcgcctagttgggttctatcattatcaaataactggtagcaacgttgaatgaagctggatccaatctgctcccaaatgggcttgtctcccactctggagcgtcacccggcctcagggagacctgaggggctggcacaatggcagcagcggtggcagcaaaccagtgtggtctgcgtgagctttttttcatatgatggttgaccacatgtatgtcttcttttgaaaagtctattcatgtcctttgcccactttttaatgggttttcttaattgtaaatttaagttccttatagatgttcgatattagacctttgtcagatgcatagcttgcaaatattttctcccattctgtaggttgtgtttcttttcatattctagtgaactactactgtacatatacttaatactaactgaaaaatagaaagcttgtccacattagtgtcagggttaaaaatatttagaatgtttatgacaatgcaaaaagagtttaaaatatcagaataaatatgttaaggcatttttgtatttattgtaaaaacagagtttgaaaaattaatcaaacagatggttttggaagttttaattgaatactttaaaatagactatacactgtctcaaaataattcttcattatgtttacagcaccaaaaacttaaaaaattaaatttgataacacaagaatattgaaaaaggaataaaccaaacttatactatccacatttgttgtttatgaattttaactcctccgaaaatactatttggttttataccatcattttcctttcattacagtctatttagttccccatatgctttaattacttatctttgaaaaatgaaaaatgaacatgtacaactcacaccattaaagtttcagataactttccatttctggaggctattaaaattattttctacagtaaaaaacgaaataggaagcaaaagtatttaatacatatgtagaacaaaaattgaaaagaatagtaaggcaacaacattaaactagtttcatttttagaaacaatagcaacaggcaaattagctttaaggagttagcatttaaagtgaaacatgctaactacaatcctccttcttaaataatgataggttctgaaatatcaacttgagctctaaaccaaagatgagttgacagtttcaattgcttggagagagtataaatatcaagcacatcatcctctcatagaaaaattcccagcctttgtctttgatacaattactgtgtcagaataaagccactcaacttttccattaacatctcaaacacattatatatcatcccaattcacaagactatccctacatggtcgcaaaattctataatctgagagaatcaaagaacttgacacttagaagtcattaggagaaaaggaaaggtattctatggaaggagtatatctggtcatgtaacaaggtgaagaaagacagcttggaaatagaaaagaaagagacaaaactagtagagaccagcatctctacagagacaggagaagatgggaccaaaatcccaggataatttattctccacttttccttcacaactcagttaaagacttttccttctctaagatgcctcccattaccagtccatcttactgattattaccttattatgtttttaaagtattttgctttatacagcatgtatcatgtttttatatgtatataaattcatatttatatatcccagttttctctgatagcctctctactatatattcaacatgcacagaagaaataaacccttattcaatgaatgaaagaaataataactacatggataaataacactacattctaaaactgagattttccttctttgcatatttttaaagaaaaaattttgttaatagtcaaggcaaatttctacatcacaaagctgtcttgcagcaaaatggaactgtctctgggccaaccagatctaacgctattcttagattcaaaagcagcagcagtcacaatattctcctttgggaaaacagccaacttgtgctgtttactttgaagttagacctcacaataatttactcttttactttcagactacattattactactatgctgggtactgtactgttaagatcatccagacatttagccaaaatgaaggtattaactatatggaagatggataaataatctacagaagaattttatttaacatgctaaaatatcttcttttaactccaagcaaaattcagtattttggcaaagacttttgaagtacctaaagagggttacttggctcagaaaatgattatgttatatatagaaaactgcagaaacttcagggctctttgactatctaccagcaccactaaaagatactatattgttatatacataaactcctaatatcacactgaaacgatcagtctgaactttaattgctgttatggtcaacaagttaatacctagttattctaagtacttcaaatgcctaacctggactggaaaatcattaagaacatcattacatcttgagctgtcttctaaaccttttatttcctttagtatgatattacaatgtgtaaacattgtaggtactaaacaaatatttgttgtcttactgctatttaaagcaaaggtcccaaacccctgggcaccatacaggtccatggcctgttaggaaccaggccacagcaagaggtgagccccgggcaagccagcattgccacctgagctccaccttctgtcagattagattctcacaggagcgtgaaccctattgtgaactgtgccagcaagagatttagcttgcacactccttatgagaatctaatgcctgatgatctgaggtggaacagtttcatcccaaaaccattccccacccaccccctatccatggaaaaactgtcttccatgaaaccggtccctggtgccaaaaagtttgaggaccactgattgaaagaaattaccccttccttagatttataaatcaataaaccaatgaagaaatgaagaaaggataaagaaatttaaaaagaacaaaggcaaagtggaacaagagagaaaaaatatggtaaatttcataaagttcatggagaaatcttcatgaagaaagtagttaattattttaaagagaaaaaatgaactaatgaagaatagagagcatcctattcattaaaaaaagcaagactgggccaggtgtggtggctcacacctgtaataccagcactttgggaggccgaggcgggcggatcacgaggtcaggagttcgagaccagcctgaccaacatagtgaaacccagtctctactaaaaaaaataaataaatccaaagattagctgggcgtggtggcgtgtgcctgtaatcccaactactcaggaggctgaggcaggagaatcacttgaacccaagaggcggagggtgcagtgagccgagatcgcaccactgcactccagcctgggtgacagagtgagaccccatctcaaaaaaagaaagcaagactgccctagttttgttcaatatttatttgacttaatatctaatgaatattattgttctctcctgatttcatctaattcatattgacaaggtaaacaaataagtccctctgtagataaaaatatggatgtcttgtgatgccatagtttataaatcgcattaaaacgttctattcaggaactgagccaatatattttattaacaagcaaagtgagacagaaggaatggttatgcaatcttcccaggcagaattcgatactaaatgtgtttgatcttgggtattctttttggcctttctttaagtcattcttatttgcaggtttagggaagcaagtaaaataaaattactgattctctgggagttagctaggtatattgagctcaagaaagcttctcctcttaaatcactttcttgggtcagtcaccgtattgaccttcctccaattaaactcttatcattctgtaccaaattgccaaatgtcttgaatatttctccaactagactatatggttctatgggaatgtactgaacattggctgacacatgatgggaactcaatatttattgagttcagacctcacaataatttatgttttaagttatctaaatgaatcaatgttttttcagctaaaaactgcaaggtcaaacctagtaataggagagcccaatcaatttagtaaatgaatggagaagacaaataaaatctaatattttaatgtatgcctaagtacagtaaaacattaaaatactgagtatatcataagacaaactctttcctaaataatgcctgtatagtaatccattttcaaatataacaactggaacatttcatttcccaaactgctcaacaaaatctacggaggaatttctaaatgtcctaagacctaaatctcattttttaaaaaatatgttttcgcttaagagggagagagcatctgaaaccactaagttctatttttttacattcctatcacttaaaaacagctgaactgatttttcttttaaaaaaaattactggctagtaataaaatcttgaagatagagatttgtgatgggaaactgatgcaaacgaatccatagcaaagctcttataaaaatatagtgtttaggtcccagttacttaatttggctcacagtttaataaagggtagttttaaatcaaatgcattacaattttactcacttcaaagcttcctcaaatttatgaattttcttttgagtatcttcttttcctttatcaagttcactctgcaagtcatgagcctgccatgacaagaacatggaaaatttattggaagacgagtaaagtttacttcaaagagacatacaaacaatgaaacagtgatcacaaatccatttttaatataaaattagatttagatatttcaagatagaaacttggtctaccatagaatgatttcaatactatactcaaatacctattttctgttcaaaatgaatttcttgagtctaccggcaggtgaattcttttaaaataaattcataacttaaaagaaaataaaaaatggaatacttcagattttttaaattatattttaatcaaagaaaagaaatcttacaagattcaagagaatacaataaacaatgtgtctatattccctgaacacataatggttatgatgaaatggtcttctcttccactgctgggaataatttgtataactatttactgagtttggaaggaaactgccacccctccccactccccgcaccatgcctacctctttcctaaatgtggatcatttgagtaaatgagatggcagcatcaataacaagggtgaaatgaaaatttgtcttcggctgggcacgatggctcacatctataatcccagcactttgggaggccgaggcaggcggatcacaaggtcaagagtttgagaccagcctgaccaacatgatgaaaccctgtctgtactaaaaatacaaaaattagccgggcatggtagcgcacgcctgtaagcccagctactcaggaggctgaggcaggagaatcgcttgaacccaggaggtggaggttgcagtgagccaagatcgcacccctgcactccagcctgggcaacagagtgagactccatctcaaaaaaaaaaaaatgtcttcacaaaaagctcttcatatgcatatgcagataaacatagccaatgtggacattttacggatcttaaaatgtaaaagggaaactttggtacagctggatgaaaaggaaggaatcaaacagcagccatggctctacatacatggcaactgaggatgcagagcccaggtgggaggtgggaaagctcaagttacttggtggggtgggaaaacccgctacagacctgctggtaagcaaggtaaggctgaaagtgaaacgagtggccaacaggtttaagagagaaacgacaagaacaacaacaaaacataaatacactatgacaaaccatatcaaacactgaatcagggctagccaaaaatacctgtagttagctatttatatcagtttaaatggagacctatttaactcaaaccctatctttaacctcttcttttaaaaattcttttggatttctgctctcagtgttttagtaaataaataaattaataaaatcaatgtttgcttataaactgaaagaaagtgagggtagacaggacattttccaagataatatcgaaaagcttctatgggctgctatgatgataatctcaaaagtaagaatacactgagaggcagagaagaaaaagcaagagaattaggaacctgtagccaccctcccccatattttaaatggtaaatttaaagtatctcataaagactatttgtcttatgagaaagagaaagaacaacttgccttgcaaatttttgccactacatttattttatcttacatgcaggaaaaagaagtctgctgttcaagtttttaccatgttcaagtgtttaattattattttggatccctaatatgtattacagtgtttggcacatagtaagcatactatactagagtacaaacattactaaagcaacaaaagcaccatttcaacgcaaatctagtctttttaatgtagagagtcaaagactaaaacctcaaaatgaaattcagatatgacctaatacaaagatcctggaaacatgtttttacatcagtaaaaaataaaatcttaagtgaaaaatcacccaccaatttaggaaaaacacacagagaaaagtcaatgtattcaagtgaaagggtgggggaaggacaattcagaagaaagttaaagggagaaactaatatgtgagatgttatcttacactggtgtttacttatacatattcacctctccttttgctttaatcgttctttcttagtcaagttctctcgcaagttgaatttggcccaaatcatacatttttttcttagatttattgctagcactaaaatactatttatgccgttttttcctgtttcctaattttttatgttactttttatacatggcatttttgttactgtcctcaactcctccatgttctgacagattgacacatagagacagaaaatgacttttccagctttattgccatataattggcaaataaaattatacatctttgaggtatacaacatggtgtttttaaaatttattttaattgaaaaatgacaaatcgtatatacatatgtgtgaagttttgatatatgtatacattgtagaaatattaaatcaagctaagtcacatattcatatcatacatatacttatttttgtgatgagaacatttaaagtttgttctcttagcaattttcaagtatactacagattattattaataataatcaccatattatatctccagatacttattcctcctgtctaaaacttttatttttgagacagggtctcactgccacccaggctgaagtacagtggcacaatggtagctcactgtaacctcaaactcctgaactcaagtgatccccccgtatcagccccccaggtagctaggactacaggcatgcaccaccacacctggatcatatttttttagaatcagggtctcactatgttgcccagtctggtataaaatgcctgccctcaagtgaacctccctcggcatccaaaagtgctgggattttagtcatgagccattctgaccagcctaaactaaaactttgtaccctttaaccagcatctacccattccctgacatccctccccacccagcccctggtaaccaccattctattatctgattctaggagtttgattgctttttcagatttcatgtataagggagataatgcagtacttgtcctccaggaccttccatgttattgcaaatgacaggattttcttttttaaggctgcatagtattccactgtatatatacataccacagtttcttccatccatagatgaacacttaggtcaatcccattcatccacagataaatacatagcttgattccatattttggctcttgtgaatagtgctgcaatgaacataggagtgtagatatctcttaaacatactgatttcatttcctttggatataaacccagaagtggaaattgctgaatgatacggtagtgctatttttaattttttgagatacttccatactgtttgccataatgacattcccaccaacagagtatagacgctctctttcttccacatcctggcctacacttgttatccctttgtgtgtgtgtgtgtgtgtgtgtgtgtgtgtgtgtgtgtgtgttagcaaaagccattctaacaagtgtaaggtgatatttcattttagttttgatttgcctttccctgatgattagtgatgtcgagaatgtttcatatacctgttatttgtatatcttctttggaaaagtgtctattcaagtccttggcccattttttaaacatcaggttatttgtgtttttgctataaaattgttttagttccttatatatttaggatattagtcccttatcagataaatggtttgcaaatattttctcccattctgtagtttgcctcttcactctgttgactgtaaatctttgccactttgtatatccagaatggtattttccaggtaaactttcaggatttctacagttttcagttttacatttaagtctttaatccatattgactttatgtttgcttatggtatagggaaagggtccagtttcaatcttttgtatatggctagccagttatcccagcaccattcattgaatagggagtcatttccccattgcttttttgtgttgactttgctgaagatcacacagttgaaggtacgcagccttatttctgggttctctattctgttccattaatctatgtgtctgttttgtaccagtaccatgctgttttgcttacagtaggcttataatatagtttgaagtcaggcaatgtgatgcttccagcttgttctttttgcttacgattgtcttggatattcaatctcttttttggttctatatgaattgtaaaacagttttttctaattctgtgaagaatgtcattagtggtttgataggaatagtattgaatttgtaaattttttaggggagtatggacattttaacaatattgattcttcctatccatgaggatgaagtgttttttgatttatttgtgtcatctctgatttcattgagcaatgttttttatcccattgtagaaatcttgcacctctctggttaggtgtattcctaggtattttattctttttgtggctaatgtgaatggaactgcattcttgatttggttctcagcttgggtgttgctggtgtataagaatgctagtgatttttgtacattgattttgtatcctgaaaaaatatagcttttttatcagatgaagttgtttatcagatcaaggagtttggggttttctaggcatagaatcatatcatccgcaaacagggatatttgacttcctctcttcctatttggataccttttctttctttctcctgcctgattggtctggccaggttttccactactatgttaaataggagtggtgaaagagggcatccttgccttgctgaggttttcaaaggtatgtctccagcttttgcccactcagtattacgttggctgtgggtttctcatagatggctcttattattttgaagtatgttcctttaatgcctagtttgttgagggtttttaacatgaagagatgttggattttatcaaaagccttttctgcagctattgagatgatcctgtgggttttgtctttagttctgtttatgtgatgaattgcatttattgatttgcatatgttgagtcaaccttgcatcccagggataaagtatacttgattgtggtgaattagctttttgatgtgctgctgaatttggtttcctagtattttgttgaagatttttgtatcaatgtttatcaaggatattggcctgaagcttactttttttgtcgtgtctctgtaaggttttggtatcagtatgatgctaacctcacaggatgagttaaggaggagtccctcctcctcaattttttggaacagcttcagtaggaatagtagcagctcttctttacacatctgctagaattaggctgtggatccctctggtcctggggtttttttggttggtaggctttttattactgatttaattatgtaactcattattggtttgttcagggattcagttacttcctggttcagtattgggaagtattcttgtatggtttttcgcatctcaatttccttcagttccgttctacttttggttatttcttgtcttctgctagctttggagttggtttgctcatttctctggttgctctagttgtactattaggtggttaacttgagatctttctaactttctgatatgagtgctaagcattatgaacttcactcttaacactgcctttgctatatcccagagattctggtacattttatctttaatctcattaaagaatttcttgatttctgcctaaattgcattatttacccaaaagtcattcaggatcaggttgtttaatttccatgtaattatatggctgtcagcgattttcttagtattaatttctatttttaatgcactgtggtccaagagtgtagctggtataattttgctttttttatttgctgaggattgttttgtgtccaattgtgtgcttggttttagagtatgtgccatgtgcagatgagaagaatatatattctgttgttttgggtagagtgttatgtagatgttatacatgcatttggtcaagtgtcaaatttgagttctgaatatctttgttagttttctcccttgatgatctgacatttgactaatactgtcagtggggtattgaagtctctcatcattattctgtggttgtctaagtcttttcataggtctctaagaatttgctttatgagtctgggtgctcctgtattgggtgcatatatatttaggataattaggttttcttgctgaattgagcagtttaccattatgcaatgtccttctttgtcttttttgatatttgttgatttaaaggctgttttgtctgaaattagaatagcaacccctgcttttttctgttttccatttgcttggtatatttctctccatctctttactttgagcctatgggtgtcactgcctctgagatgtgtctctcaaagacagcataccattgggtcttgcctctttatccaacttgcctttatccaactctgtgccttttaattagggcattttgcccatttacattcaaggttagtattgatatgtgcttatttgatcctgtcatcatgttgttagctggttattatgcagacttgtttgtgtggttgctttattgtgtcattggcctgtgtacttaagtgtgtttttgtagtggctgttaacggtctatccttcccatgtttaggactctcttcagaacctcttataaggtaggtctggtggtaatgaaatcgcttagcatttgcttgtctgaaaaggatcttatttctcctttgcttataaagcttagtttgctgggacataaaactcttggctgaaaattcttttccttaagaatgctgaatataggcccccaatgtcttctgatttgtacggtttcttctgagaggtctgctgttaccctgatgggcttcactttgtaggtgacgtgccccttctctctagctgtctttaatattttttttatttcgaccttggagaatctgataactatgtgtcttggggatggtcttcttgtggagtactttgcaaaggttctctgcatttcctgaatttaaatgttggtctctctagcaaggttggggaaatttttatgaatgataacccaaaggatattttccaagctacttgctttctttccctttcagggacaccaataagtcatagatttggtctcttcacataatcccgtatttctctgaagttgttttcattttacttttttttttctttatttttgtctgactgagttatttcagatagctgttcttcaagttctgatattctttcctcagcctggttgattctactgttaacacttgtgattgtattctgaaattcgtgaagtgagttgtccagctctatcaggtaagtttggttcttcgttaaaatggcattttcatatttcatatcctatattattttattttattccttataatccttggattgggtttcaacattcccctgaatctcaatcatcttcgttcctattcatagtctaaattctacttctaccatttcagcctggttaagaaccattgctggagaactagtgtgggtgtctgtaggtaagaagacactctggctttttgagttgccagagttcttgctctggttctttctcatctgtgtgggctcatgtcccttcaacctttgaagttgctgtcctttggatggtggggtttttgttttgttttgttttttgcttttatctccattgatgtccttgggggtttgtggcataaggtggggtccatcgactggcttcatttctagtagattttgaggagccaaggctcagctcaacactcccacactgtatactctaactctaaggggctggtatcgggtcactggctttgttctctggtccctcaaagttgggacctgctgtgttaaatgggccaaagtgttcctggtccgatggccacaacactccaacgagtggtgccagccaaagcgcttcatcaggcagtggcaatgtgattaatgcttgtttgcatgtgccagcagcagtggtagtacaccagggttcacccttgttagctggggtggggcgctggcagaccagcaactgccagcctctgtatgcgcattcacagtggcagcagtggcaccatggaggggaggggtcactggcatctgtgtgtgcattcacactggtgggcagtgttggcatagcagtggatttctggctggggtggggctggcaaactccttgtgcatgttcacactggtggcaatcgtggtgggaggcagggccactggccttcctgagtgctttcacaccagaaatggcagcactgcaacacagcagcaagtgggggacgggtacactcacgctggcagcaatggcgcagtgggatgcacgcacatcactgcaccagcatggaagggcaaggttcacccatgcacacatgtgccaatatggcaataggaggatggccttgggtgagtgcttgctggtaaagcagcatgggggaggctgcagtagagggagagtgtgagtgggccagtgcatgtcagtgggggccactctgctggagctctctggcaatctggcacagtctgccagcacaggagctatgatgagggccctagggaggcatcctggttgagcatctgagtctgcactgtaagcaggcaaagccaggctatggtcccaggagaggccagccgatgggagagttcaggtaagactggccccatctgctctgttcaggttcaacaattcttttaaggctaaagtctcctagaggaacatggccagcctgagggaatgggcatccccggccatgcccccctgcaaacattccctcatcaaaactctctgggctctgtacaggctggagtcctgccccaaccatctctctaagcaactctctctgccagctcaagtgtgggggtcatggggtcttctgctgccaggattccagaggtccaaagcaagagcagctcactccttgcctgctcaactcacccattccccaggagacattaggagccaggaagaagacccagtgtgtggcagccccatgcaggattcccagcttcctcccctttcagcccagtgtctctgtcctccctctgtccactctcagtaactttcctctgaagatcgacttggaatgtgccagtcttcccaatgtcctacccccttggtggcagatattctttctagctgcatctagtcagccatcatttcccacatttattgatttacctatcttgagcaatccttgcatcccaacaataaacccacttggtcatggtgcctgatcacttaatgtgctgttgaatttggtttgctggtattttgtcaaggacatcgtctttggaaacagattttaattacactaatgatgccataaatatttcacaattatttttaacctacatccctctaatatttagcaagttaaaaattaatacctctgccctgttaaaataatagcttggcatatgtttacttctccctctcctagtcattttggttttcttttatataatcttgagatgctgaggcagatagtggttttaaattgttttaacttcacataccttctttttcaagattctcttctgacatttccattgtttatattgtgtacacaataaatatttaaattcatctctattttaattttggcattcaccagtactttttcgttcttgagtattttttttgtttgatttgatcttttgcttatccttaggctgattaaagtccatcatccagtaattttatttttcaaaaagaatatcctagtgatatatcttctgaggctttgcacattcaaaaatgtcattctgttgcctttacacatgaaggaaattgtaggtataagattcttaggtcacaacactttggcctaaaacacagcacacgttaagtttctctattgttttatgacatttaggtttgcaaataagaagactaaagtcatctaaactttgctttcccctccccctggggtctggacatttataaaaatcattctctttgtactgtaattcaaacattttttaatcttgtattgagttttagctgataaagagtgaaatctttaaaattacatacacagaccttctgaaaagttttctcatatctttagttatttttgtgttattttattctgagccttccttcagaaatatcagttgttatatactggttttctattttctgccttaatatcaccttcctcaaaatttttgattctttgtccctttcttttgcagtctgaaaggtcattatgccttgccttcatatcgctgatttaattctttacaaaatctgacctaacccaaccagcaactatgtgatcgtaagtctgctattgtacttttggtttccttacgatttccttatgacaattttcacttcatccctttctttccttatggtgtctgttcctccttcatagatatcatatcttcttgtatgctactggtgaatttttaaacattttcttccggagtaacacattttcaggagaaactccttcctctgaatcttctgtgtaatgctctcattcctttcctctacaatgctttcccacagactccattttggttctgttctcctactcattcttgaacaccgtacaccactcagacttggtgcttgatattcagaacaccattcagtttgctgcttgacaaaaaccacaggggctgtaactgtgcttctattacgtgtctctaagtgtgatctctctctcagagatacagctaaaaccaattcccaggagggtttgaactaggttacactgctctactgaggaggcacgtttctcctcaagccacagcctgcttcactggtactctaaaatgatatgttacacagcctgcttcactggtactctaaaatgatatgttatacagcctgcttcactggtactctaaaatgatatgttacatgggaaaccaacaaggaattgctatcagagttgctgacaagtcaataagtattttgcaaattggcactgtgcctccaatgtaccatgtaccagtagtttcccctctatttactgttgattttttttttctgggactcagaactgccacataaaagcacagttgagatttacgcctttaaatgggaagcttcaaaaaattaacaatttttgagaaaaatctatctctaaaattatacgatgattacgagtccaagctcataatcagatggcatggatttgtgtccctgttccttcacaaactacataacattctgtgcctcagttggctcctctgaaaaactgggataacaatgagtatatcaaagaattgtgataagttaataaattacttgatgtaaagaccttagaacaatattaggaacataataaatgatcagtatatgtgaaacattattattacttcctcagattgaataactcaaggttattgtgaacacccaaaatcacaatgtgccacaatacagtaattcccttagtctgtctaccttttcagaaagtagtacctgaattgccaattttgtctttttgtaactgctttttatcattaattattgaatcttcacctctgacaagttcttagctgccatttcttgacactggtcagtgtgctagcacaagcaccttgatctaatttattgcttctaaaattattagaatgaaattatctgggtgggaaaataagggactcccctctgaggtaaacatcaatgtgtcaatgaccatacttttgagctgggggtttcttaaggtagaagctgtttctcatttttatatccctaggacccaggataatatctagcccatactccaatagtcaataagtattgttttaaatttgttttttcttaattgaatatatctgtattgtttaagagcctttttggattgcatttttagtttttacctatattccagacagctgtgggtgacataagtaaacaccagaaaagtgagagataattgcatacagatcttggcaaaagagaacagatcaatacttttggtgggttaaaaaaaaaatccttgtttgtgctgggcgcagtcgctcacacctgcaattcctgcactttgggaggctgaggcgggcagatcacgaggtcaggagattgataccatcctggctaacatggtgaaagccccgtctctactaaaaatagaaaaatcagccaggcatggtggcacatgcctgtgatcccagctacttgagaggctgaggcaggagaatctcttgaacccgagaggcagagactgcagtgagctgagattgtgccactgcacttcagcctgggcaacagagcaagactctgtctcaaaaaaaaaaaaaaaatccttgtttgtacctaaaagaaaattaaagaacaaacaacctagaaagagataatgctatttccaccccttcctttttaatgtacaaatggtagtaagcaataaatgatttgcttgtaatcctttccccactttaaattgttaataccagaaaagtatttaaaagtgataggtaatgacaacacaaaccagatagtcaaggatacataatatattttcaaacatgagaatttgctataaataattgatttaagtagccataagcacatttattgaatattcactgaatatattttttttgctcccttgcatcccaagaatttaggtaatcacaaaaggaatattgtgtagataagaaagagattgtgctatatatcagaaactagatatactgtggcagacaccatagcatagtaaagtgcacagaggaggtactgacccaaacactgactagctgaataactccacaatgcttcttaactgctatgacctctgcttcccaatatgaaaaataagggtgattagattgcataacttctataaatcttttcactgcacaatttcatggtttaaaacatcactaaaggcacacgtactcttaaaaatcatgtcagtggtagttcaaaaatactatccaatatgttaaatatacggctgtgactattttaaacatgatttaaaaagcgtgcatgattgctaggcattggaataactatattttaaggattgtgaactccattagacttcgtatctcatttgttaaacagttccatcagaatgattttaagtagatatttcaattcagtacattttagaacgtaggtgcttaacatatgtctggcatgtttctctaggtaaacagcaccatcttttactctctggaactgtttggaaaacaagcaataggttatctgtagggggcaggtgtttccttgctagtcaaatcatttagtctaaccatttcctgatttaacagatgaggacaattcatcaacaatgacatttcggtttactacttattatttgtttgatgttcaaagatcttaagagcagacaatagccactagagatcaataaagaccattacataatatgtgtgtgcttaaattagggacagcatctgatgctgtttcttttacctcaaagacaagttagaatcctatgctcctgtcctgctgctgtctcataggcaggataaaataatgtcattcagatggcatttcctccccctgaagagatatttagaactaagttttataccaaaagttattgaatgtgcacacctgtaacactaacaacaacaacaacaacaaaaaagccctatacatcccatttagctctacaattacatagtccagagctacggaagatttatgtcaggtcttcgagctatcaaaaaggatattccctgagagggatataagacatcaaaactccaaggcttgagatcacagcaggtttaataaagaaagaaaaacagatgtcaatgtaaaagggggagattatgaaattaattgtaaaataaaaagtggcatgctgagcaacattttcttccaatgtaaataatgttaggaacatatgcaatatgaacaatgatggctatttttcttttaaagattgttattattttaaacaaatcttagttacagtgaaaacaactaatatacattaacaagtaacgttattaaaaagctaggccaattgataccgcatggaaagggaatcactgtagttatgacacctaataaaaaggatttaggtctgctccttgaagtgaaatagaataggaatggtcagcaggctactggatacagatgaactgagctccaatattccctttctagtgtacattcaccagggagggagactgatagcagaaaccttagtttacttcgaggctaaatacccaagaaaagataatggtagaagaaagatttcctttctaggtctatctctatgtgcgtaacagtcctcagcaggatgtaatgaagtttgggataggaataccttattttacaaatagccagtgcatccctttctcctcactacagcctgtctgtctcacaggtacatacataccaggatatcaggaagagggcttaccagactgcaacagagcaggaagccaggaagctcttccttaatggatggacagccagtgatctgcccaaagaatgaacggtggacaaacaatacacctaaaggatactgatgccttatacaggaagcaaggattatgaaaaagtatgtccatttcatatgaaatatacttaacattttgtattgagctgcattaaaactgcaacaataaggaaatttattatgatttaaaagagcactcatgcaggtcaatacgtgttgctagaaacacttttccaaatgacagaaacagatttcttcctatacactaagctcatgaagggcagaatctatgtctaattcatcctcaaccccaccccagtacctaatataataccttccccaatataaccatttaatgggtatctgctgagtgactatatggataaacaagatggtggtattacaaagtgttttttaacattttgtgatataaaccatatgtaattttaacttgtatgtattctaaatagtttaaaggttaacttttttcattttctattatttttgtattttacaagtagattgacttgataaatgttaaaacagcagatagtgacaaaagcagcaacaaacatttgccatttaactactcttttactttctatatcttatagcaaaaaagaatttagaaacttaagtttcatagtcagaaatctatagaactctgtttttcccgagatggtggaccagaggcctttccaacgtgcctcatctacttggaagaattttgtccaagaaggaaatgaaaaatcaacagaaagtgaaagaaaacttcagatactggggaagagaaggtgagcagggagacagtggctaggtctggttgagaactgagtgaagctccaatataggagaggggaagagaatgtccctctgcaatctacctgtctactgaggaactgtgcaacctaggccatggggaacaccctatccctcccaagccctggatataactaggagagaggccaggagcgtgtgaaaaggaatgataccaggaagtaccccaggcattgtcccagacctgggacccaacaggacaatgccattcttgattctaactcatatcaagctcggcgggtccctgaaatctagcagtggcggcagcaccagcattagtcttgggccaggatttggagtgctggatctggagcaggggaagagcccccacagccagaacttagaggtaagtgtggtgtgcaatccagctgtgggtgctagaattgggatacccctccttcatagaccgaaataggaggagagttgctgaagaggcatggttttgcctgggtagcaggttttgtggccacaggcagctttgaaaaataaagtaaaaaaactgcacgtaacatttctgagtgttgcaactggctcccttgcttggaataggggtgtgagccccctcaggtctgaagagtgagaggtgggtccccctcctgatcacctggagtaggcatgtgggacacccatcacttcccatgcagagaacttggtgcagcagtggttgctctgtttcttgcccagccttatctccagccacctgctgactacctctagacccctgtcagggctggtgcttgtgcctactgttgggagatgtgaatgcagacttgcccagtccagctctgcccagatttggcctccactgagactgagcacaggacccagtccactgaatattccatggcccagccattgtctgggcaatgaagtacttctcatggttaacaaaggtcaagcataaactttattcctacaagagcaactggcgtttttacctgcaagtgccacctactggtctggaggttgacctgcaaaccccatagtaaatctgctgacacaaatgcacagtgcttgggaataacgtaagattcccacgccccttgctaccacaatcatcaatgccactgtggcttctcaggaggctgtgagcctgcttaccttccaggtacaccactactacaaccagtatttgagaaagccaccacactaagtctatttataaccaaggaaatcatacaaagccttaacattcaacatacccagaagtaaacagctctacccaacatacttcatagttatatccgcaagaaaaaaagttacatttcaatgaaattcaaaactaagaagttactatttctccagatgtgaataaatcaccataataataccagaagtatgaaaaagcagggtagtatagcacccacaaaggaacacagtaattttctagcaatggatcttaccaaaataaaatttttgaaatgctagataaaggccaggcacagtggctcatgcctgtaatcccagcactttgggaggctgaggtgggcagatcacaaggtcaggagatcaagaccaccctagctaacatggtgaaacccgtctctactaaaaatacaaaaaaaattagccaggtattgtggcaggcacctgtagtcccagctactcaggaggctgaggcaggagaagggcatgaacctgggaggcagagcttgcagtgagccgagatcgtgccactgcactccagcctggatgacagaacgagactccgcctcaagaaaaaaaaaaaaaaaaagaaatgccagataaagaagtaaaaatactgattttaaagagattcaatgagataaaagatattctgaaaaccagcacaaagacatcacaaaatcaattcaggatataaattttaaaaacttgccaatgagacagatatcttagaaaaaaataatttctggaaatgaataattaagaaattacaaaatacagttgaaagcttcaacaattgactggaccaagcagaaaagaaaattctcagaaattgaagacaagacttttgaattaatccagttaaacaaaaataaactaaaaataaattttaaaaaaatgaacaaagcctttgagaagtatgggactacataaagcaactgaagttacaaaagattgccattcctgaaagagaagaaaaagcaaaaagtttagaaaacctatttaaggaaataattgacaaaaacttctgtagtctagcaagagatttaaacatccacatacaagaagtgcaacaaacactagaaaaagatattgcaagatgcagtttaccataagaaatagtcatcagatgttgtctaaagtcaacatgaagaaaaaaatcctaaactcagcaagacaaaagcatctagtcacctattaagaaaaaaaacatcagactaacatcagacttctcagcacaaaccttttccaaaccagaagagattgggatccgatcttcagagtgcttaaaaagaaactgtcaaccacaaattttatatcctgacataacaagcttcataaatgaaagaaatacaaagtatttcccagacaagcaaatactgagggaatttgtcactattaggctggttctataataaatgctcaaaggagttctaaacatgtaaatgaaaggtcagtattcaccaccataaaaacacatttaagtataaaactcacaggtcttacaaagcaattgcacaaaggaggaagagaaagaaattaaatagcaacatgacaaaactccaccaacccacaaagagaaaaaagaaacaaataatttagaaaacaactagataacattataacaagaaaaaaactcacatatgaatattagccttgaatgcaaatggaatgaatgctctacttaaaaggtaaagattgacaaaattgatttttaaaagcatgaacaaaaaaagtaaagaccaatatccctgatgaacatatatgcaaaaatccataataaaatactaagaaatcaagtccaacagcacatcaaaaacataatacaccatgatcaagtgggttttactccagggaggcaaggatgattcagcatatgcaaatcaataaatgtgattcatcacataaactgaattaatggcaaaaaccatatgaccgtctcaacagatgcagaaaaagcatttgttaaaactgaccgcaccctaatgataaaaaccttcaacaaattaggcatagaaggaatacacttcaaaatattaaaggatctgtaaggcaaacccacagccaacatcacgataaacagggaaaagttgaaagtaatcccaataagaactggaataagacaaggatgcttactttcaccatgcctattcaacatagaactagaagtcttagccagagcaatcaagcaagaaaaagaaataaaagccatccaaatagaaaaagaggaagtcaaattatctgttattgataatatgatcttatacctaaaaaaccctaacaatttctccccccaaaaacctcttaaatattaaaactgaattcagtaaattttaggatacaaaatcaatgtataaaaatcagtagtatttctatgtatcaaaaacaagctgagaaccaaatcaagaagcaatcccatttacaatagttataaaaaaaacctaagaatatatttaaccaaggaggtaaaaggaaaactacaaaacactgttgaaagaagttgtagatgacacaaacaaatggaaaaacatctcatgctcacggattagaataattaatattgttaaaatgaccatactgcacaaagcaatctaagattcaatgcaatccctaccaaaataccaatataatttttctcagacttagaaaaaacaatcctcaaattcatatggcattaaaaaagagccagaagagccaaagcagtccaaagcaaaaagaacaacactggaagcataacattatttgacctcagattatactacaaggttatagtaactaaaacagcatggaactggcataaaaatagatcagtagaacagaatacagaacccagaaacaccaccacataactacagccaaatgatctttgacaaagtcaacaaaaacatatactgggggaaggacacccttttcaataaatggtgctcagcaaattgaattaccatatgcagaagaatgaaactgaatccctctctcaccatatataaaaatcaactcaagatggatcaaagaattaaatgtaggacttgaaaccctacaaatactggaagaaaacctagggaaaactcttctggacattggtctaatcaaagaattcatgactaagacctcaaaagcacaagcaacaaaaacagacaaatgggatttaattttaaaaaagcttctagaaagcaaggtaaataatcaatagagtgaaaagacaaccgtaagaataggagaacatatttgcaaactatgcatctggcccggggactgatatccagaatttacaaggaactcaaacaactcaacaacagcaacagcaacaaaataataataataattaataaccccattataaagtggacaaagggcatgagtagacatttttcaaaaaaagacacacaaaaggccaacagacctatgaaaaaatgcttaacatcactgaatattagagaaatgcatattaaaaccacaatgagatatcatcttattctagtcagaatggctattattaacaagtcaaaaaataacagatgttggtgaggatgcagagaaaggaaacactaacactctgctggtgggaatgtaaattagtataatctccaaggaaaacagtatagagacttctcaaagaactaaaaataaaactaccatctgatccagcaattccacttctgggtatctacccaaaggaaaaggtcattattcataggtttctcacagcatgattcacaatagcaaaacatggaatcaacttaagtgcccataaatggatgactggataaagaaaatgtggcatacacacacacacacacacacacacacacatatatagatatatatagaccacacacacacacaccccatttgtatgtacattatcttaaatgaaacaactcagaaagggaaagtcaaatgccacgttcttatttataagtggaagctatataatgggtacacatgaacgtagagtgtggagagtgtggaatgacagacactgaagacttggaagggtgggaggttaggaggggacgagggatgagaaattacttaatgggtacattatttgggtaatggttacactaaaagcccagacttcatgattatgtaatatatccatgtaaaaaaactgcgcttgtacccgttacattcacacaaaaattttaaaaataaatctataaaactctgcactttactgcctaaggtattaagtgtgtcaataaccccctagttattacaggagggatatcaacatgtgtcagttgaaatagtactataaacaacaaggaacaattgctaatctttttcaagtagtagtcagtactttcattgttttaggttcttttgttaaaatgtttaaagttcttgttgcacatatgacacaacagaataccaaatacatcccattgattgtgtagttttaaactagtagaaagaaaatataatttcaacatgttataatgagaggttaagataataatacagttgtcccccagcatccatggggaattggtgccagggcccctttaggataccaaaatccatggatgctcaagtcccttttataaaatggtgtagtatttgcatataacctacacacatcctcctatgtactttaagtcatctcataataacttatatagtacctaatccaatgcttacacatcacttcattcacatggattcaacatagtacttgacacatggcaaatccaagttatagttttggacctttgtgtaattttttttcctgaatatttttgatccatgtttgactgaatccacagatgtgaaatccatggatatgaaaggccaactgtactcttcactcattaaatataacacacaagcagtgttttaatgttgatataactaataattgaactgaagcagttgtttattatataaacaggaaaaataagcaaaatttaattactggttagctgaaattaacttagaaacaaattattcttggctgggcgcaatggctcatgcctggaatcccagcactttgggaggccgagacgggcggatcacttgaggccaggaattccagaccaacctggccaaaatggtgaaactccctctccactaaaaatgcaaaaattggctaggcatggtggtgcacacctgtagtcccagctactcaagaggctgaggcatgagaatcccttgaacctaggaggcagaagctacagtgagccgagatcgtgccactgcactccagcctgggtgacagagcaagactctgtctaaaaaaaaagacaaagaaacaagttgttctttaaaggtgagaatgtatggtttcataaaaatcagtctgcattaatgcctcatttgctattttaaatattttatagcttccataaaacatattacctttttttcatagatgtgttttaaatgacttttctccatctgaaacttattttcttgatcctgtgaatgataaatgtttatatttattatactttaaattatactagagtcaataaaattagcaacctaattaaatcaatcaatctacttaatgtcaaacttcagttcagagttttgcatatgattaagtaagccctacaggtagaaattggagtagctttgtattacgaggcataaaatcttagtcacctgaagatattactattctcaaaagcacttgctttacagtataagaaaatctttctgacccttaggattaagagattacttcaaaaatgaccaagtcaataaatatggaaatgataaatttgaagttacatcatgtaacagtccttggtattttttgatcacgagagaaaagagatctaaaaggtgcaaaagagagagacagagggagagagagaggcagagaaagaaagagggaaagaaagagagaaattatgaagattggcaggtaatttaaaagaaggaaattattctaaaataatgatatatttaaataaaatttatttttaaaactaatctcaaaagagatcattccaattcaaattattgtactttattctctacatctcaaagcatcaatctctattaagataaataaaatgtaaaattatacaatgcgataaaagaatcagaaaagatgacctgcatttctgagttttatttttttaattgactctcaatgatacatctgaatcaagaaaactgtgtttgaccattgttcttctgtgtagaaatacaagactcacccttagttgttgctttctttgaagttctgattcctgtaactgctgttttaattgacagacattctgctctaattcttcaatcatactagatgcctacaaggattttaagaagaataaaaagcagaatattgatttttgtaccatattatactttctgattgaaaaaatatgccttttgtacccctgaaagtccaatcagaattaaaattatctagaaatttgaatgaaaaatgtttttaaaagatactagaaaaaataatcttttaaagtaaaaatataaattaaatgcagcatagtattaaatattatgaaaatgtaatgctgacataaaaatataatcttttaaagtaaaaatagaaattaaatgctacataatatttaatgttatggaaatgtaacactgacataaaaataatagctttacagaaaacttcaaaattttaattataaaatgaaagcagaaccaagatttcaaaacaataataacgcatatagttactctatgaaatgtattattcatacaactaagcattggaatttatatgtttcctccttttaagactggcacttaaaatgattagcttatagcagaattcagtttattaaatatttgtgttgtgctatatagtagacatttcgaattttaaacattttaaataccagtaaaaattcctgaagttcctgttaatttaagaataaagtgaaagagagattaatttcaaatgccaaataatttctacttggctatctatggctctaggcttagtgaataaatacttcatgtggattatctattaacataaataataccttagaagctgaaagagcatgttcttgttttagaaggtttatatcagcatcatatttggtttgtaacagtttcatgttttgctcataatcatttacaagatggtccttctctttatgcagtgtgttacgcctaaaaacaagagaataaaatagactttcaatgtatttaaaaccaatctctaaaatgaaattttttaatcagctaaatccaaatacatttccattcaatatattaaataagtatccacaattttgtcaactgcttctaaacattctgcttatgttaaaaacaggttgggtacagtgactcatgcctgaaatttcagcacttgaggaggccaaggcaagaggatcacttcagaaaaagagtttgagaccagcctgggcaacagagtgagaccgtgtctctacaaaaaaataaaaatagaaaaattagccaggcatggtggtgcatgcctgcagtcctggctacttgggaggatgaggagggagaatcgtatgagcccaggagtttgagatacagtgagccatgatcacaccactgtaccccagtctgggtgacagacagagaccctgtctctaaataaacaaacaaacaaacaaacaaacaaacaaacagcagtatttagattagaaacttcccaaggctaaacgcacaaggtgtaattaattttggcagataactgatacagttaatatcagtactttatagctacacctgataaatatctgatttcagacaataccttgcctttacttcttgtaattcactacacgttatctggtaacatctttcaagttctgctttttcttgaattaatttctgcctctgtaaattactgttctctgcttctccagtcagctgctggacacgggcctccagttctttgatcatgtggttctaaaagaacaggtcatggttaagaaagtctctgactcagttgtaacacttttgtatctgtaagaagcttgaggaacacgtataatctataagaataaataaaacaaatgtatcataaaccatggtagtagaaattaaatcaaccttgaacttaaccaagtctttaaaaaaacaatgcatactaccagaaaaataagaacatcacagttatatacttttagccttttgttcatttaatgaatatttactgaggctggtaatattcaagaatgtagatacatagcagtaaataagacaaagttcctatcctcaggaaggtttcagtctctatgcctctttatacgtacggccattagctgactacttaccagtgatctttgcgtttgattttaagtttttgaaatgtgttataagagtaatgtaatagtatttttaaaggaaatccatagccccaaaattgtagcacaagggtgttcacataagtgatacacttatttttaagtgtataggaacatttaattagttgtgttagtgtgcaagatttttattcattttttaacatctttgccgttttgtaaaatgcacttctctactcttccacagtattaagattatcactcaactaaatcatttctctattatttaatatttatttagaatttttcccctttgtagaactgcaatttaaaacgtggataaaggtatttatcatcttttagatactttatctaaaattagggtaagcaagcattagatgaagggacagttaattttcagttttaaaattaaacttctaataagtgtgagcaataaggataggttagtatgatgttgcactcaactattgtgttattctaagagaaccattttaaagatgcagtttaagcattagataatattacaaccctgacatcctttcttcatctcatcctttcttcattacaataccaaataggtatacaagttaaattttggtgtaacagcttccaatctatataaatgacttatctaacttaaaagcatggtttatagactaacttctttaaatgcatacaattctagactgacaaacatcagaagttctgatttcttcttcctgcatcttattcactttgtctcttcattatccctctgctttaggagctcctttcagaaaatagtttccatttcctaatatatattctaaacaccctttatgtcctgcgtattcattaactggaagaaacaaagaacatatactttgccttccagttttagatggcggaataaagatgatttgtattccttcgtctcttggaaaccaaaaacagacaagataaactaaaaatagaaatgcaaattccatactaataaaccctacaagaggatattctattattggcaataaaagagtagcttgcagcagatcacaatcccaatgctaacaactgaaaaacccagttttgttttgttttttttttttgtttttttttttttttgagacagggtctcatagcgcaatcttggcttactacagcctcaacctcccaggctcaggtgatcctcccacctcagcttcctgagcagctgagactacaggtacatgccaccacacctggctaatttttgtaccttttttggtagcgatggggtctcactatgttggccaggctggtttcaaacccctggcctcatgcaattcacccttctcagcctcccaaagtgctaggattacaggcgtgtgccaccatggccagtgaaagatttaattagtaggaaagcacttgagaacttctaaggcagtttgaaaacatcatagagatgaggcatcatcctgtaaggtgcttttaccctagaggtatttttcaatgacggaagatgaggatggggcaaggaaacaaaggcagatggtggccgaggcagccaggacttgaggacacaagatccctcagaaaagcaacacacagagaagtgggcaccacaccagcagttttctcaagagaatttgtcaaattctttttctttttctttttggagatggagttgcactctgtccaggctggatctcggctcactgcaacctccacctcccaggttcaagcaattctcctgcctcagccatctgagtattggaattacaggtgcacaccaccacacctggctagtttttgtaattttagtagaggtggggtttcaccctgttggccaggctggtcttgacctcctgacctcaagtgatctgcccaccttggcctcccaaagtgctggcgttacaggcatgagccactgcacctggccaaatttgtcaaagtcttagcattcacagggcaggaagccaagaaaccaagtgaaaaaaaaaaaaaaaactcagaaaagcacactagagttttctgcagtatcagtgtacttaggagtaaaatagattgtccaaggaggagagcccctagtattaataatatcacaggctttcagttgagacctgtgttgaggactaccactaggagcgaaagttagtcaaaagtagaccaaagattaccaagattgcaactcagccttgagtcaattcagtccctgaatggatccagtgatctgtctctacaccagctgcctctcagaagtgagagaagagcctctctggaagaagataacatcatccacagcctttattattttttgtgcacaatgtttggcaattaatcacaaaataacaggcataccaagaaataaaatcagaggaaaaatagaaatagacatgcagatgccccatatattgaaattgtaaaacatatgaggcatgtgttttcctgactcaaaatatatgagacatcacacaaaattaagtgaagatcaaatataattacaggaatagtccagaagaagaagtctcgtggctggaaatcctgaaaatgtcatcagaacacacttgtacaaactaagtggcatgcaaataacatcgctggttcaataataacagatgcatacattccaactgtagcttctttcaacataatctggcacgaaaaagaagcaagaaagattatgctgaatgaaaaaaatcacacaaaccatttttgcacaaagcaatctatggatgagattgattaagggaaagaaataacattatgagcaagtaaaaactgtaagagcaaacaaccaacatagaagaaaacaaaatggagatccagcatttacctagttagtgtacctaaagaacagaaatggtagaacaagaaaatgtacctaatgacatacaagaaaactatacatgaaaataatatacaaatagagtatactgtaaaagtcacacagaatgaagaatgccaagacataagtaaaattattaaacttcaaggaaatgatccttttaaagcattaatcagacctgtcactctcttgcaaaaccctccaatggcttctcttatcactcagaataagaagagactatcatggcctctgatttcatctcctaccaccctccctctcatttactatactccagccatacaggcctccatgctgtttctcaaagtcatcaagctagcctcaaagccttttcatttactgttctctctgcctaaagcatcttcctccaggggcctgcatagctcatttcctcacttctttcagttctccacctaaatgtcatcttgtgaaggaatctttccatagccattctacctaaataagcagatctctactgcctatatttctgtggcctcttaccctttcttttgctttttctttctttgttgtttgttttccacaataaagtataagcttaagacagccaagacattgctttatttgcactagatctcctgtttctttctagcacactgcttagcttgtagtaggtattcaataaacatttgccaattatcaaaacagctgaccttgaatgatatgggtttgaactgtatgggtccatttatatgcagatttttttttcaactaaatggtgatcaaaaatacaatattcacaggatgtgagacccacttacatgaagggtccgctttttctgtacccagactccacaatgccgattgcaagacttgaatgtgtgccaattttgatatacacagaggtcctggaaccaatcccctgcatataccaaggcactactgtattctcaaaaataaaaacaggataactgctaaaatgtcaaaatgtcccttccatattcaaaactggagtgatttctggccatattatagaaaatattagcattttataaggttataacagggttacaatgaggaaataacaaacatctgtccaatatagaatatatcaaaatgatttttgcatgttttataaaaaatagagataaaatacaagaaatccaacatagaggtaaagatattcccctctatattaaaagaatttctggaaatctatttctttttttccttatatgaatccaaaataaatgtgaacatcataaaattttagaaagtatcaaattgctaaagaaataaaccaaggcaaagggggttgaattacacaaataaataaatccacagactttgcctaaagaaaaagggtttctgttagccagaaaaaccagacagctctctttctacaatgtgaataattacagtggagatgagagaaaaaatgctcagataaaagcataaaactatttttatgagagaaagaaaaaaagagataaaacagaaagatatccaacaaatcagagaagaaaaatgatagacattgaagcaatattgtgacctcagctatctgtatatcattgaacaaagtaacagtgataaagtgaacttgaattttttttgtttttgttttcgtttttgttttcactgagacagagtctcactctgtcgcccaggctggagtgcagtggcgcaatctcgactcaccgcaacccctgcctcccaagtcctaatgcttcagtctcccaagtagctgggactacaggcatgtgccaccatgcccagctaagtttttgcatgtatatatatatatatacatatatatatatatatttttttttttagtagagatggagtttcgccacgttgcccaggctggtcctgaacccctgacctcaagtgatctgcccacctaggcctcccaaagtgctaggattacaagcgtgtgccaccacgcccagcctgaacttgaaattttgactaaggaattattaaaatgatgaaaaaaattatcagatctgaaaggaagagatttgtgactaaaataggtaacccgaggactgtacctgttcaaaaggagcagaactatgagaggacgtggttcctgttcattgccctattaaatgctgtggtctgcactactggccagtctttttgaggatatgcatgtattgtaagtaccgacaagtgagtacctctgtgaacgtgctacttgcccatccttatttgtcttcacctgttgacaaaccttcaggttccaacagaaaacaactgttggtgaagttgtggagaaactggtacccttgtgcactgctggtgagaatgaaaaatggtataaccattatggagaacagtatggaggcacctcaaaaatttaaaaatagaactaccaaatgatctggcaatcacacttctgcttatttacccaaaagaactgaagtcaggatctcaaagaaatatttgtactcccatgcaaaagtattcactatagccaagatgtataaacggcatagcataaaccagagaaaatggtgaataggagatgggactaatgtgcagctctctcctggatggacagaacagcatctggagactcacattgtgaacttttgctccaagaaccaccacagaaacataccaggaaaaccaaaagaattcacagaccctttgaataaaacagcttgccactgcaaacaccacaagacagccgaaaaactgagctcccgaagtgtgatgggggaaagtcagcctccaaatacacatccacactggggagcctgaacaatgtaaatgtccatggatgaatgaatagctaaagaaaatgtggtatatacatgcaatggaatattattcagccattaaaaagggaaagcctgttttatgttacaacttgagtgaatcttgaaaacattatgctgcatgaaataaggtagtcaaggagggacaaacactgcatgattccagttacaggaaatatctgaaatagtcaaacccatataaacaaagtagagtgatgattgccaggggctagacagaatggaaaatggaagttgctactcaatgggtacagagttttagtcacgcaagacaaaaaagttttaaagatatgccaataatatcgtgcctatagttactaacactgcattgtaccttaaaaatgtgttaagagggtagatctcacactatgtgtttttaccacaataaaaagaaaaagagaaaacaatggctaaaacttaacaccacattaaatgtgcatacatgtaaaattcttgcccaataaccaaggcttcatggaccaccgacgtattttgatgatgaatataatgacaacagccaccactgaaccctcattataggtcaggcactgtgctaagtgttttaccagctttaggccatttctctttcccgcaaaactatgaggtaggtatcattaacatcattttaaatatgaaaaaactaggacttaggaaaattgattaacgtggccacagttgccctactggtaaactggtaagcagcaaaaaagaatttgatccaagatctccttgaatcaaaacctattccactgcattacatcttctccaggactttgatattctgctcatggaattaacataaaataaatttgcaaaaatacctcgggtagacatatcatttcaaaacataaagtaaacaaagaaaagctaaaatgcaacactgcaatacttgaggtctctttcttaacctcccacattattactgctattattatcagtcccaagataagatattttttaattgtgtaatttgaaggttgtagtgttttctaccttgaacaatctattataataaagggctggctagtgaaattctactcatttctaagcccctttattaaaatgctcattccaggagaaatgagactcatgaatgggatattataatctatttgctaaaggaacagaccagtagaaataatctgttaccataaaatgtctcctaaatatgtgtggaaataaaagtggctcattatccaatgatttcttaaacatatactttagttagcttagattaataaagtcaaaagttatcaggtttaaaatataataatttttaagaactaaattttaaaatatacaaccagaatgctctaaaaataacatttcaatatccatccactctccagctctccttcttcccgtgaccacctctctctctcctctccctgttctctcctctctcctctggctctcccgtgctggtcatgctaatgtcactgcggtattatgacattagcatttcaaactacattgaacaattctaactataatgctaagtaatgattaaatcatccttctttccagtatttatgcatagtctttcccccatttcaacaaattaaactgcccatcctgaattttatcatgacttccataggatgatttttcttataatactacaagattatgtttgtctttccgtaacaacaattcttactctagtaccataaaagtatgaaaagtacattcccaattacttcatcagtaatagaaataaaaaggacaggccccagaaccagtcccttcagcacactactcaccatattccatcaggctcatactactttttaaaatgaattttacaacatacctgaggccaaactttactggtttgtcaaaagactacttctcctgagaattcttcagaaaataactcaaagaatgttatgtataatatagattttaagtatatacatagatatgattattatatatctgaggcccaccagatggacaaaaccaatctagctggtactgtctgtgaaggctgacataaggttaggaagtcctggggctgtaccagatacaacagggagtcggaggttgcagtgagctgagatcgcgccactgtactctagcctggcaacagagcaagactctgtctcaaaaaaaaaaaaaagaaaagaaaagaaaagaaaaaagaagattctgatacgatttattcaaacagtgaacacctgccaagacataactgctgttagaagctggcatgctttctcacatgcagataagtattacatgaaatgaaaaagtggcctttgcattaagatctctatttgtcaaacaaatacttttgtatatactgatgccaagtttctgactgaagaagcaaactatgtgacgtcacttattcattttatttttgatttttaaagcattttctgaacactaatgttctacacacaattttacacacaaagtacataaattttgaacctataacatcaagggaaagcctataggcatatataaagtatcttaaaaacaacaacatttgccaaattaattttttaaacggaataaaagagctgagaggatgcaaaatagtggagttcttaaaatggagtaaaaacttagtcaagaaaaagaatgctgatgtagaactatgttttgccggctgtaacagacaatgcagaagcagaattcagtggtatatgacaacagaatcagggaagaaataagttactgtacagaaaatgatgaacagattaccttgtatgaacaggatatcttcccacattgggaactgaaaggtagcacttggaaaactaggttggacttcgtgaactgatgtaacttgtaagcattaattataataggcatgatactaggaactcagattcttaatcatgggaaaattagaaaaaaatgcatctattggctatggagtaagaggagacagggaagagtaattggcaggttactggaagagtcaggaatgaggcaacaacggccaggactcaattggtagctgtggaaacagaagggaagagagcagatccaggaaaattttcagagaggtaaaatggatgattctgtaacatactaaataagggagatgaaaagtgggaaaaacataaatcttccaggttcaaaatttaatgtgccaacagaatgatgatgatgccaactgacaagaggaaatttgggaaagggtattattttggtattaattatcataggtttgatttcctataagttaagtcttagaaaatataaaatgtctcatggtcttttcatcgtacaacatctactgacataagaagtcagtactggagatataaatgttggagttttacatacaaacttaattcgaaaccttgtaggagttaaaaattaaaaagggttagtattaggcaactacttggtatccacagttctcctatggcaaacccctatggcaaaaagagcaactaattttatcttatttcacaaacttcttatgaaaataggacatattttcataagaagaagaatttatccatgaaaataggactattttcataagaagtttgtgtgccactgcactccagcctgggcaacagagcaagactgcataagtcttaaagatagagtttatgatttataacaaaaggtgcttatgtcttaaagatacatacgtttatgatttgtgaagttataaatcataaatcttaaaaataaattctgataacttttttaaaaattgaaaactcatgagccactagaagtgtgaacattgccagcctccctaaagccttattagttaccctccacccaaaggtaaccactattttgacctctatcagtacaaataaattttgtccttttcaaactttgtataaatggaatcacacagtatgtaactttttggggtcaggcttcttcatgcatattatatgcctatgggattcatccatgttgtggaatgtaagagtaatatttttcagtactgtatatagcatgctaaaataatttacccattctattgatgagttgtcttcagtttttgactattaaaaataatgtggctatgaaaactctcatacatgttttatgatgcacacatgtacagatttcttttggttatacatgttgcagtgaaaccgctgtcataagatgtgcctatgtcaagcctcagtagttactatcaaggagcttttcaaactggatataaaaatttgaacttcttacagcagtgtatgagacttcagactattctgtatctttgtcaaaactttgtactgtgattttgtttttttaattttagccctttttgtaggtatgtagagatactgaatttacatttccctgactattaataatttgagcacctttttaagtgtttattaatcatctgaatagcttcttttgtgggctgcctattcaaatacattgctcttttttattgaattgtttttcttgatgatttttttctatatttaaaatgcaagacctttattgaataaaggaattgcagatatcttcttccattctgaattgccttttccctttttttctttttttttttttttgagacagagtcttgctgtgctctgttgcccaggctagagtgcagtggtgcaatctcggctcactgcaggctccacctactggttcaagagattctcatgcctcagcctcccgagtagctggcagcatgtgccaaccacgcttggcgaattgttgtatttttaatagatacagggttttgccatgttggccaggctgtctcaaactgctggtctcaggtgatctgcctcccttggccttccaaagtgctgggattacaggcataggccaccatgccagcctcttttccctttcttaatgatacctttggtgatcaaaaggtattaattttaatatatcctaatttattagtatctttctttaaggtaaacatttaatttcccttttaagaaacctttgactagtccaggccaagaagatattctaagatttcctctttaagttttatcattttatctgcacatttaattctaagatgttcctaaaatgggtttattaaatgatgtgaaggttcaagatgcattttttctatatgaatattcaattgaccaatttattgaaagaaccacttttcacagtaaatggcttggtaaaaaaaaaaagtaaataattgtaattttcattaaaactattatcctatattactagtccccaaaattcaaaagaacaaggagaaaatgattttagaattattatataatgaatatacattgagaaacaaaaaatatagccatcaccaaaataagtattgtaggaaattaaaatttttgtcaaacaaggaaaaacattatgtttgacctaagtggcaaatagagcagagtttaaatgttaatttattaaaaaacacctttaagcaaaacagtgtatagcaggtcctcaaataacatcatttcattataataacgagaaaaaaaatttggtttcattatatgtcacttcacttataatcagtttccaaaaacctatcaatgacattaaataaggacttactgtatacacaggctagtatatactgtatacacaggtcagtatttccttggtcaggtgagagggtgcaagagaaatgataccccaaccgcagcatgcataactagcacacagatattggtttccaataccatttctccatataatccgtattgatggggccatgtccaagaagcacagaagtcaaatgaaagagctcccaatggccaaagctggaacaatttgagcaacaaaatgaagaaatattggcttataacccaaagcataagaaaaatatccacattctcatattagtatgaataaataatagaataaattgataaataaggagaaaaagtctcccatgcagaaaaattccaaaaatttatatagataccccaccctcaagagcagggagtaaaactccctacttcttaaacacgggctgccaaacggtaacttcctttcaagtagtacagtatggaaaggtggggagtaactttacactggagaaacctaattaacactacctcagccagatgatcaaaattaatatgcacaggtatgatgtcatgttgataatatgtattcatggctgggcacggtgattcatgcctgtaatcccagcactttgggagactgaggaaggcagatcacctgaggtcaggagttcgagaccagcctggccaacatggcaaaaccctgtctctactgaaaactacaaaaattagctgggcatggtggcacacacctgtaatcctagctactcaggaggctgaagcaggagaatcacctgaacccaggaggcggaggttgtagtgagctgagattgtgcaactacactttagcctgggtgacagagagagactgtctcaacaaaataaaataataaaataataataatatgtattcatgatatgatacgatgagaatagcactttaactctgaggatcttcctgcctaaacccacaaccccagtctaatcatgaggaaagcatcagacagtttctactagatgggcattttacaatatgcctaaccagtcaatactcctcaaaactgtcacagtgataaaaaacagggacagtctgagaaattatcacaaccaagaggaaagtaaggaggcctaacaactaaatgtcatgtggtatcctagatgagatcctggaaaagaaacaacattaggtaaaaacgaaggaaatctgaataaatgaaagactttagctaatagtgtatcaatattgatttacttattgtgaaaagtgtaccaagataacctaagatgtgaaaaacaggagaaaccgagtgcaggttatatgggaattctctgcactatcttcttaaattttctgtaaatctaaaactattaaaaaaaagtgtctatttttaaatggtcattttattcaacatgatgaattggtgctatttggagattctctcgattataatcattgtgagcttgggagaagaaatggtgatagaaactataaaatcaaattctagctatctcagtgtgtccatgagtagttctatgaattatcatatgtcactactaacatagttaaatatttcagatgtctaaggcttttggcactctttaaggtaaaggatcttaacctaccttaacctaccatagaggatcatggatggaattcagactgtcgctgaatttgaattttttctttaaagttcactttcattttcaccaccctaactgaaagttaacatttcccaattgtgaatgtagtcatcagacaaaggtagcattagcaatacctggaacaaacagaaatcatggatatttttatagttcattacactactgagcaatcactatacattgtttaccctcattagaaattactatcatgcctactgctagattttgatatttactgcattaatttagaagcatatgtattactttatcacagttttgatttatgaatattttaacaactgtaactcaatataatttttctttgtaatcttttatttttaaaatactattctgagaaggactacacagaattcaccagattcccagcagggtccatggtacaaaagatgttaagaactccagtaagaaagcctagaatctcaataaagccgcccacagattttcagtgtgtctaaaccctaatgtcaatagaccctatcattttacagccttcatcttcccaagcatctagcaaggaagctataatttttatatttacgttttaatatttgttttaaaaatctattgtttgcatattttcactatgagtttctcataagaaaatccctgccaataccaaaatgcgtaagtctcataatctatacaagtgtctgcttacaataaatggcaataagacaacactagactcaacaaaaaagaaaaaagcctgaaagaacagcaaaacagagaaactgattctcagtgacagtcccgtctttcatcttaagccaggccttgaactctaccttgtttaattattaaatcaggagctgctcagcaagacctgtctacttttgacgattcttaaattcaatcctgctgacagactccgtccatgtttctctatatttactagtattacctatgacaaggtttgaatgctaatttttaaaattcaactttcattaaaaatagaatgaaagttctctgacaggtacctcttggctccaaagcatgacttttctttttatcccaaacttataaaaattaaaaattccattgtgaatgatatttctctcaatattatttaataaataaaatatacctatgcaataaacatcaaagcaatatattttacaaatttccattgtaatattatttaatatatttattaaatatattcactttgtgaagatttagaatgttgaaataatgaaaatgtattttagatttaaatttgttttttgtccatgcctttaaatatcaaagaggtatctgtacacccacgtacacggcagcattattcacaacagccaaaaggcagaagcaactcaactgtccatctgccaatgaatggacacacatgtggtatatgcatagagtggaattattatttagcctttaaaaaggaattttgacacaagccacaacatgaatggaccataatgacattatgcgaagtgaaatacgccagtcactgaaggacaaatactgcataattccacttacatgagtttcctagaatggtcaaattcgtaagagactaaaagtgaggaactgaataaagacggcaaatggagaattattgtttactgggtacaaagtattaggaaagatgacaaaatttggagctggatggtagtgatagttgcactacagtgtaaatgtacttaatgccactgaactatatacttataattattaaaatggtaaatttcatgttacgtctattcaataaaaaaagaatgacgaaaaagaatgtgatgatttatttgtatcctaaatatataaaatgttcctataaatcaaggaaaagaataactcaatttaaaaatagacaaaggggatgaaatggctattttaaaaggccaagaaatgtaagagccaaaagggaaatggaaattaaaataatacattttttcaagctagaaacaaaaaaaaaatttttttttttgaaacagggtcacactctgtcacccaggctggagtgcagtggtgtgattatagctcactgcagtcttggcttcctgggctcaagcaatcctcccacctcggccccacaagtagctgggactacaacgtgcactaccacgcccggctaatttttttattttttgtagagatggggtcttgctgtgttgctcaggctggtctcaaactcctgggctcaagtgatccacctgcctcagcctcccaaagtactggggttacaggcgtgagccaccatgcctggccaaaatattttaaaatttggtaagtccaagtcttggcaaggatgtgaagacaattcctactcttgttgagcagtgccataaactggtatgaccactttgaaaagcttactatggatacagaaattacactcttaaatacatactccctaaagcagtgattttcaaattgtgggtctcaatccatgtgaaatcaagttttaaatcacaacccagcaatttttaaatgaaattaaacaaaatgaaaaatacagaatatgttagagtaaatggccaatagtaaaaatgaaacttttgtttgagttataaatatgcagacagatgtgtgctcatatatgtacttgtgtatgttctgggcataatttattaaatttatttcttactgggagtcatggtcaaaaatgaaatgaaagccagtggcttagagcagcagttctcaaagtttggtcaacaaactcctgagcttcccaaagactcttttagtagatccacaaggtcaaaactatttctataactatacaaagacataaattgcctatttcactatcatttcctcacaagtgtacagtggagttttccagaggctacatgacacatgataccacaacagaataaatgcaaagacagatatgagaatccagttgcctgctaagacagacgttaaaaagttttttttttctttttcttttttttttgagagagagtctcgctctgtcgcccaggctgaagtgcagtggtgcgatctctcctcactgcaagctccgcctcctgggttcacgccatcctcctgcctcagcctcccgagtagctgggactacaagcgcatgctgccacgcccggctaattttctgtatttttagtagagatggggtttcactgtattagccaggatggtctcaatctcctgaccttgtgatctgcccgcctcggcctcccaaagtgctgggattataggcgtgagccaccacgcccggccaaaaagtttttaaaaatatagtccccaaagaaagcatacaccatactagtgtgtttaactactaaaaatgggtcccaaatttgactctgagcaacctaaacaaaatagaaaacatgatcgtttataaggatcttccatgagcatattaagcttttctccttcttaaatccaatggtttaatttttaatattttcatttataagtgataacataattaaaacaaaaattaaatcacattttttacctattttgtgagctgaattgtgtcctccaaaaagatatgttgaaggacaatctcccgtacctatgagtgtggccttatttggttggaaatagtgtctttgcagatgtaagcaagttaaaatgatatcatactggattagggtgggccctaaatccaacaacttctgtcattatgagaaggccatgtgaagacatcgagacagaaatacacaatgaaaatgcaaatgttgacagcaggactgccatgctgcagctgtaagccagaaaatggcgaggaccacccgcagccaccagaagctccacagagacaagaagaattttcctctaccagaaccttcaagaaaagcaggttctgctggtgtcttgctttcattcatacttcaggtcttcaaaactgtgaggcaataaatttctgttgctttaagccactcggtttgtggtcatttgccacagcagccctaggaaatcaacataactatcaaactggccaactttcggtttgtttttatttatttttattttcatttttattttatttatttatttttttgagatggagtctccctctgttgcccaggctggagtgcagtggcatgatctcagctcactgcaacccctgcctcctgggttcaagtgattctcctgcctcagcctcctgagtagctgggattacaggcacacgccaccatgcccggctaatttttgtattttgagtagagacagggtttcaccatgttggccaggctggtctcgaactcctgacctcaagtgatccgcccaccttggcttcccaaagtgctgggattacaggcgaaagccactgcacccagcctgtttttaattaaaacacccatctttggtttgaaaatgtagaagaacggacattcacatatactttcaattagagagtaattttattatgtagatattaatttttttctttttcatcatctcttttctaaagtttcaatagtgagcttgtatatctttttgcaataacaaaaactttcattttaaaaccactattgtcaccattatttaacatttttctgtaagttctagtcagtgtatgataaattataaaatacttgctacatacatgtaaagggttgaaatttctaacacacatttattcttgagtcttttctacagcagaaatataaaactttatacaacaaaagtttgagactcaggaataaatattacaaaagatgtcctaaagaccccagagtactgttttctttattaacttggtaaattgattctaaatgtacaatcatcccttgccatctgtgggaaactaattgcaggaccccctacaataccaaaatccagagatgctcaagtcccttatgtcaaatgacatagtacttgcatataccctatacaccccctgctgtatattttaaatcatatccagattacctacaatatgtctaatacaatgtaagtgctacataaatagctgttatgcagtacttttatttgtattatttctattgttgtatcatttttgtttttttttttatttttttgaatatttttatgtgtggttggttgaatcacaaatgaggaaccgatagatccagacagctgactgtatttgtaaaaggaaagggcccagaatggccaagactcttctgatgaacaaggaaggaagacttccttatcagacatcaagagtaattatgaagctgtaatagagatgacagtataatcattgcagagccagagaaattatccaatgttcacatatatagaagttcaatatataagagcaggcatgacagatcaatgaaggaaggaggaattactctaaagtaaagctgggaaaaaaaagttatccacatagaaaaaaacaaaattaaatctcttatcctgcattagtcacaaaaactaactccagaaggattaaggcctcaatgttaaaggcaaaactttaaagtttttcatagaatatataggcgaaccttcttgcacttacaatacagacagatttgtttaacaagacataaaaagcactattttgttttttttatttttgagacagagtctcgctctgttgcctaggctggagtgcagtggcgtgatctcggctcactgtaacctctgtctcctgggttcagacaattctcctgcctcagccttctgagtagctgggattacaggtacgcatcaccaagcccagctaattctgtatttttagtatagatggggtttctccatgttggccaggctgatctcgaactcctggcctcaggtgattcgcccacctcggcctcccaaaatattgggattacaggggagagccaccacgccaggccaaaaaagcactaagtgtaaaagacttatacatttgactaagttaaaataagaacttctttcatcaaaagaccatctttccctccaaatcctatcagctgatgtattacaatctaggagactgtcgctctccaaagttgtatttctctcccttaggattacaaggcttgctgatcgcacatgggaatttgcaaaggagagttcaacagtggtcctgtggtattatggagatctctccctgaggttcaccccatccttgctacttgaacagactctaattgaccaaaacaaggacctagtcttccaggttttccccaatatgcgtaagagtaacttataaacccaagggacatgggctcacagtccaaaatatctagatacctcaaaaaaaacactatgaaagaaagtcagcagtacttgcatatatataataatattatcacctatattatcattcataatacacagcacattatgacttatataacattctgaagataaattatgagaacagatgaactaagaattttaaataagcttaattaataaagagtcaaatgaggccagctgcagtggtgcacacctgtaatcacagcactttgggaggccaaggtgggtggatcacctgaggtcaggagtttgagaccagcctggccaacatggcaaaactccatctctactaaaaatacaaaaatcagctgggccatggtggcacacacctgtaatctcagctactctggaggttgaggcaggagaaccgattgaagccaggaggtggaggctgcagtgagctgagattgtgccactgcactacatctgggcgacagagtgaaacttcatctcaaaaaagtaaataaataaagagtcaaatgaaaatactaggtataaaaaataatcactgaaataaaaagtaatagatccctaagcaggagtaactctaccaaagaattaactgatgagagtaaaaacagaatgagaaactatcatagaaataaagaataggaagaaaatacaaagagatagaaaatatagcataagacctaagaggtagaagggatagatcttttcaaagaaataatgattgtaaatactcagaactaaattaaaaaactcaaatttaaagggctcaaaataatgccaaaaagtccataactagagacattatagtgatatttacatatataaaaatcaaagagatgatgttcaaaactgctcatctcagatcttcatacttgaaaaccaagtggggtcacatttttttctaatgtttattttttattaatagatgtggctccagtgtcttctggaaatggatattgagataaagaaacctaaaggtatttcgcattttttctcatattagtgacttaattttttgttgttttttcttcagggtaggggaatggggagaggatgtcagtgttttacaatttggacactcaaaggattctagagcctcaaggactcccagggatctgttcaccacacttggccagttgccatggtaaaaacctcaactgtgcctgaagtctcccaatccagagactgttgtattctctccagaaaataacctagtgtcttctgctgagttgtagaagagacaatcccatgcttcacaaaatgggggagaagatataaagatttggtcattttttattttattatttttaaaaagtcgtattatcaaatatctacaaaattacaaagaagagtataaaaaaaccccttgtacctaacactccaattaaacatctagctgcctcttaaataggccttctagcaatttatgtgttgaagggccacttatcagccctcttccagagatgcctggagcctctggagctcccatggtgtaattcatcttgcttctcaggttccttcactgctgatttagggttatgctttcttgagcctgctagatcaatttcaacaaatccattgcctttccaactccaaaaattgtattgctctcttattctctttgtccatcagggcttacacctttttctttaccctattcctattatttccatggaagggaatggaggcccaaacaattttccactcttcatcaaacaaatgtgttaattttttcttttttttggatccattgcccaagctggcatccagtagcacaatcacacctcactgcaaccttgacctaatgggctcaagtaatcctcctgcctcagcctcccaactaactgggactacaagcacacccccccgggcctagctaattttttttttttttaagagacatggtctcaccatgttaccctggatggtcttgaattcctgggctcaatcaatctaactacctcagtctcccaaagtgctgggaacttcttaaactgagtccttctttttcgtttgtgtgtctctcttgattgtcattcttgtatgtttcatttttgaacataatattaacaatgatctgagtgtttattattgtgtatattaatataatattttatgtatattaatatatgtatatattatatacttaatttatgtatattaatatttccaacaacttacattatattgtactactgttattctattccacaaataagaacaattaacatctgaagagcttacatgacactcaagctattaaggagttggaatttgaacccacaactgtctgaccctaaagtccaggttccaaacaactgtgcataccacttctcatttctttttcaatgtgaggtagaccttagtgctggtccaagggtgcaaggtaacacactctaagatatatgtgtcatacgcctgcgtaacaactcttgtttaaattccacagctttaaattcaagaaagtacttggaccaagccaggctggcctggggaggttgtgaatggtaaatgagacagagttcatgcctgggatacaacacttgaccattctatgaggtcatattacatacagatgctccttgacttaaaatgagatcatgtcccaataaacctatcattaagtttcaaatatcattaattcaaaaatgcatttaatacacctaacctaccaaacatcatagcttagcctggcctatcttagatgtgttcagaacatttactttagcatacagatgggcaaaatcatctaacacaaagcctattttataatgaagtatagggtatttcatgtaatttactgaatactgtattgaaagtgaagaacagaatgaatgtacagatggatggtccccagcttacaatggcttgacttacatgactttttgactttacgacagtgcaaaagcaatatgcatcactttaagtacccatgcaaccatttttggaaataagcccatagtaaattgaggagcatctggtattctactgaatgcatcttacctttgcaccaacataaagtcaaaaaattgtaagtcaaaccatcgttaagtaggggaccatttgtatcagtaacaagactgatgcgatgcactgaacacggacatgaggagctctgagccacatgcagagtagccttccagcaaaactgttccaggcttatggatcttgagatgtaaggcaggttcctaaagagctgaagacagtcacttccccagacctagactccacagccatatatatatataatcaatgaagattctctttgggagatcctctatctcatcctgaccagtgtcacaggtctctctgctgtgtagcctgactgtggtgacctccttcctgaattacttcagtaaggaccattttgggcttacccatgtgatgtctatgtctggttcccgagttaatatgatctattaagaacactggtcagagtggtcacactactccaatctccctctttgatttccttcacattagcattattttcagaaaaacaatcaagtcttccatttaaaaaaaaatgaaacaaacaaaaaaagatagaaaagaaatggccaggcgtggttgatcatgactgtaatcccaacactttgggaggccaacgcgggcagatcgcttgagtccaggagttcaagaccagcctggccaacatggcggaaccctgtctctactaaaaatataaaaattaatcggatgctgtggcatgcacctgtagtaccagctacttgggaggcttaggcacaagaatcgcttgagcctgggaggcagaggttgcagtgagctgagactaagccactgtactccagcctgggcaacagagcaagaccctgtctcaaaggaaaaaaaaaaaagaaaagagattatctctgaactgaaagtcaatggaaaaaaaaacaagaagaaaaaagatttataaaggcttctgagggttaaaaaataataaataagactaggtacaggggctcacacctgtaatcccagcactttgggaggccaaggagggtggatcacaaggtcaggagttcgagaccagcctggccaacatggtgaaaccccctgtctactaaaaatacaaaaaatagctgggcatggtggcgggcacctgtaatcccagctactcaggaggatagtttgaacccaggaggcggaggttgcagtgagccaaggccatgccgttgcactccagcctgggtgacagggtgagactccgtctcaaaaaataaaagtaaaaataataataataataaataaaaagcagcattaaacacactagagtcaaatccctcacagacttcaagggtctgtccatggccacacataaatctgtatggagtaggaaggtaaagtttttcttttgattctgtaacacacttctttctacactgtgcacatcagggaaacatgaggacatggaaattgagaagacaggttctaagatgtcaagaacaggtttaaagactcactgtggactgtgtttgcgccatgtattcactctccattttattcagacgcacatttgtatcctcaagcaattcttgaatgttttcagtgtgttgcttttgaagatcaaacttttcctgttccatttctgctacagcattgtgaagctacatcaggaaatcaagagttgactcttttactactatggaattgactattttgtaattcagcggaaaaaatggtttctatattcctctatttatatatatgatgacctgaacaccaaaagatacaaaaaaccaccagtaaacattcaaggtaaagatatcatataaaaagcaggatcaagaaacacttaatttttcctttactttcctgaattgaaaattttaatggatgaacaaatattaaaaggaattatctgcctcaggtagaaatggtaaataaatcaggcagataatacaagtgaacattactagtattagtctgaaatgagaaaacagaaacattataatattgtaactaattaggaatattgtcccattgtccccattattcatcctatttgcacggaattttgtacaccagtaatgttaaaaactgctttctcccctacctgcacctcaaacaagaaattacttctagtcattccctaatctatacaaaaacagacaaaaagatcacatttatcagtcaaacaatatgggtaggatgactaagcagaattgtatactacatgtacagaggtctttatttataaaaatcattatgtatatactgtttaaatggatgagcttttaaaatttctacacaaactaaggtaaggaaaacaaaggcaaatacaggaggtccagacaagcttcaatggacatcttccaaaaggggttgaaaatctgtgctcccagccctgtgggcattccttcacttatcttaatgggggtacaactccgagtctaacttccattccctgcatccaaccccacacctacccaataggagaagagaccaggagtccaaacagtccaaatgatatatttggctttttgtttttgtttttgttttgagatggagtctcactctgtcacccaggctggagtgcagtggtgcaatctcggctcagtgcaacctccgcctcccaggttcacgtgattctcctgcctcagcctcccaagtagctgggatcaaaggcagccgccaaaacatctggctaattttttatatttttagtagagccggggtttcaccatgttggtcagcttggtctcgaactcctaccctcaagtgatccacccgcctcagcctcccaaagtgctgggattacaggtgtgagccaccgtgcctggccccaaataatacatttgattcactacctataaatagggaagagagaaaggacaaatagaggcagtgtgaactcttatttgactagaaagatactggaaggacagggaaaacctgtgagagatggaagctagggcagaatgcaggcaataattatgataattgtactggtaaaggtctcaagaacgcttcttctagtttctagctgaataggaagaatgaggatgctcagtaatagccatacagaagactcctggattttgcaagtttaacatacacagttttgattatttgtaagtggtccccgaaatccctgatgtatctaatttttagttttgctgaaataaacattgtaaagcagtattaggtctgttgttcaaaagtgagtcacatagctggtacaatgcacccaaatctcagtgctccttcacagctgtcgagtgacatgatagtaactcagataatgggctctaaaggagtcacttagaattttacagttgtacttacaggagcaattatatgatgtagtggtttcctcatgtttaaggtctcccaaagcccctagaacatatgcctgccgaatgtcaaaaatctaatagcccatcaaaacttagtggtttctcatgtgtcttccacagttgttttataaagggaccgtcgctgtcggaggggtggctgtaagtcagtctacaacactcatccaaggaatttgtagttgagactacaagggtaaaaatggcactggcaaaaacaactatgctattacttggctgatgtgtttgaggactagataggcatctggtctcatagtctaaccagaggtgattaaaatgtattcattcaacaaattttattagtacctgctatgtaccaggcataatgcatcagtgagcactttcccaaacctaacaatgaattggagtccaggtcactcagtctaggaggctttaaagggcaaacgttcctttaagggataaactatcttagtagcaaatattattaggctataggatacaaatcttgctggagtttatgaaaccataggacataacaatgagttgatccataggaattctcaagaagaatttttacccagagtttgataatgggtacaggagacaccaatgcccttcccagcatcctacatattcgtctttaaccatatagttggctcatgccagaggagacccagaggcaacagaaatctgtcccaaataaagggaaaagtattacaaaaccccacaggtcaatagcgcagccactgtggaaaacactttggcagttcctcaaaaaatttatcaaaaagatacacagagttaccacataacccaggaatcctactcctaggactacacctaacagaatgtaaaaacacacacaaatgttcacagcaacattattcacgatatccaaaaagtggagtcaactcaaatgtctatcaactgatgaatggataggcaaaatgtggtctatccatacaacgcaatattatttgaccataaaactgattgaactattgattcatgctacagtgagggtgaaacttaaaaacattacggtaagtgaaagaagccagtcacaaaatgccacatattatattattgtatttatatgagatatctagaataggcaaatctataaagacaaacagtagattgatggttgaagagcctggggtgtggggagtggtaactgactgctgatggataaaggtttctttctagggcaatgaaaatggtctgtaaattatattgtggtggaagttgcacaactttgtgaatacatcaaaaaaaccaatgaattgtatactttaagaaggtgaattttatggcatgtaaatcataactcaatattttttaaaggcccacagaacagcaaaacgtgttgacagctggggcaaaagtcaagacaggaagaagaattgtgagaaaagatgaggcttgaaagatcaccagagtctttatcatgaaaagccttgtaagtcctaagaactaaggaaacaatgggagccactaggacaatgggaaacactagagtgatttaaacatgattgtgaggtcaaccagatttgtgtttgtgaaagaccaatttggctgtattgtgggacatggaatgacgacggacagactggaggtagaggccagttacaggtgatctaggcaagagacaggggtctcctgaactaaggaaggaagagtggtagatacattcaaaagatgaataattaacagaacttggcaaggcattagatgtgtgagctgaagcaaaaagaagagtctttaagtagctgagttgatccctatcccatagagaataccctactgggtaggtatatccctccatgggataggcatctccatgggataggtattctccatgggatagggaaaaaggaaatacccattttagcaacaaacgaagaagatgaagtttaaggacaatgatggaattcagaccaaggagagattttaaataggtagttgaataactgggacttaaggtgagagacataggatgcatatttctattagggaatatacacacacacatacatatatcaccttgtccatgtagaatacataataattgttgaatgaatgactacataaataacaaagtgtatctaacatgtgcttattaattttggtgcctgtcctgcttgtactcagttttcatctcagcccagatttacataaaattactctacacacacacacacacacacacacacacacacacacacagccttcagtgagggggcaggtacagtggctcacacctgtaatcccagccctttgggaggccaaggcggaaggatcacttgaggccaggagttcgataccagcctggccaacatggaaaaaccccatatctacaaaaactacaaaaattagccaggcagtggtggccacacctgttattccagctacttgggaggctgaggcatgagaagagcttgaatccaggaggcaaaggttgcagtgagctaagattgcaccactgctctccagcctaggtgacagggcaagactctaaaaaaaacaaaaaaaaaaacttcaagcaggtttacgtatttacacatccactatttattgtataactagaaaaaaaagctttactaatccagcagaaagaaaaagacgtacccttgtaagtggcagaagcctcttctcttcaaatacctgacaatttaaactagaatatatgaaattagggaattcagacaaaggaaagcaggggacttgctaggtacacaatgtcattgaagtaaatacaaaaatatgccaaatttatagaaaagataaaaccaaaatgtgagaaagaaaaaccacatgactagaaataacaaaataaaaactagaaaagaaccaactaaaaagcaatctatagattcaacactatcctatcaaattaccaatgtcattttttacagaattagaaaaaagattctaagattcatatggaaccaaaaaagagcctgaatagttaaagcaatcctaagcaagaagaataagtcaggcatggtgcctgactcctgtaatctcagcactactgggaggctgaggcaggaggatcgcttgaggtcaggagttcaagacaagcctgggcaacatagtgagaccccacctctacaaaaaaaagttttaaattagccaggtgtggtaatgcacacctgtagtcccagctactcaggagactgaggcaggaggatcacttgagcccaggagctcaaggctgtggtgagctgttatggtgccattgcactccagactgggtgacagagcaagaccctgtctcaaaaccaaaataaaacaaaagaacaaggccagtgggaatcacattacccaacttaaaactatgttataaggctacaataaccaaaaccacatggtactagcataaaaacagacacatagaccgatgaaacagaagagagaacccagaaataatgatgcacacctacaaccatctgatctttgacaaagttgaccaaaaaaatggagaaaggaccccttatccaataaatgggatgagataactggctagtcatatgcagaagaatgaaactggataccccacaaaacacaaaaattaactcaggatagattaaagacttaagtataagacttaaaactataaaaatcctagaagaaaacctaggaagtaccattctagacattgaccgtggtaaagaatttatgattaaatccccaaaagcaattgcaacaaaaataaaaaatggacaagtgggacgtaattaaaataaagaacttttgcacagcaaaagaaactatcaagtaaacagataactcacagaatgggagaaaatatttgcaaactatgtatctgacaaaggtctaatacccagaatctataaagaactcaacaattcaacaacaaaaaacaaataaccccattaaaaagtgggcaaaggacatgaacaaacaattctcaaaaaaagacatacaagtggccaacaaacatacgaaaaaatgttcaacatcacacgtcatcagagaagtgcaattcaaaaccacaatgagataccacctcacaccagtaaaaatgggtgttatttaaaagattaaaaacaacagatgctggcaaggttgcagagaaaaaggaatgcttatatactgttagtgggaacgtaaagtagttcaaccactgtggaatgcagtttggagatttctcagggaatttagaacaactaccatttgacccaacaatcccattactgggtatatacccaaaggaaaataagtcattctacaaaaaaggcacatgcgcttgtatgttcattgccatgctatccacaacagcaaagacatggaatcaacctagatgtccatcgatggtggattggataaagaaaatgtggtacatatacaccatggaatactagatggccataaaaaaatgaaatcatgtccttcgcagcaatgtggatgcagctggtggccataatcctaagcaaattaatgcagaaatagaaaaccaagcatgttctcacttacaagtgggagctaaacattggtatatatggacataaaaacaggaacaatagacactggggactcctagaggaaagagggggacaaaggctgaaaaactactgttgggcactatgctcactacttggatgatgggatcattcatatcccaaacctcaatgtcacacaatataaccatgtaacacacctgcacatctaccctctgaatctaaaataaatgctgaaattattttaaaaaatgaaataaagtatccataatattcaaagcaatatacagattcaatgtaatccctatcaaaatatcaatgacattttcacagaaatagaaaaagcgatcctaaaatttgcatgtaaccacagaagattctgagtagccaaagcaatcttaagcatgaagaacaaaggtggaggcatcacagtaactgacatgaaaatatacttcaaacttgtagtaactaaaacagtatgctattggcataaaaacagacacacagaccaataaaacagcatgaagcacccagaaaaaaaatccacacatttacagccagctgatttttgacaaaaatgccaagaacatacaatggggaaagtatagtctctttaataaatggtgctggggaaactggatatccacatgcagaacaatgaaattagacctgtatttctcaccatacacaaaaatcgacgcaaaatgaattgaaagacttaaatggaagaaccaaaactatggaactactaggagaaaacatagaggaaaagctccatgacataaatctaggcaacaatttctatacagcacctcaaagcacaggcaacaaaagcaaggaaaaaaaaaaagacaaatgggattacatcaaactaaaaagcttctgcatggaaaaaaaaatcaacagagtgaaaaggcaacctacagaatgggaaaatacatttgcaaattatacatctgatatggggtttatatccaaaatatataagaaactcaaacaactcaatagcaaaaaaacaaatattctgatgattaaaaaataacctaatgacttatttaggccaaggacctaaatagacatttctcaaaagaagacacagaaatggccaaaaggtagatgaaaaatgctaaacctcactaatcattagggaaaggcaaaccaaacttacaatgagatatcatctaactgtagttagcatgattattattaaaaagtcgaaagatagcaagtgttggtgaggatatagagaaaagagaacccttatatactgctagagggaatacaaattagtacagccattagggaaaactgtgtggttcctcaaaaaattaaaactggaactaccatatgatctaacaatccccctactagatatatatctgaagaaaataaaatcaatatgtcagagatatctgcattcccacatttactgcagcattattcacaatagtcaagatatgaaatcaatgtaagtgcccatcaaaggatgaatggataaagaaaatgtgatagatacacacacacacacacacacacacactggaatactattcatccataacaaagaatgaaatcctgccatttgcaacaacatggacaaacttagaaggacattgtgttcagtggaataaactgggagcagaaaaacaaatacataatcacactcgtggaattttaaaagttgagctcatagaagtagagaacagatagcgattacaagaagcaggggaggagagggaggaaaggggacagagagaagttaaaaagcaggtataatgttacagttattgatagggtttggctgtgtccccacccaaaatctcatcttgaattgtaatccccataatccctatgtgtcaaaggagagaccaggtggaagtaactgcatcatggggtcagttcccccaagctgttctcatgatagtgagtgagttctcatgagatccgatggttttataagtgtgtggtagttcctcctgtgttcattctccttgccgccttgtgaagaaggtggcttgcttccccttcacctcctaccatgactgtaagtttcctgaggcctccccagccatgctgaaccgtgagtcaattaaagctctttcctttataaattacccagtctcaggcagttctttataacagtatgaaaatggactaatacatagtggacaatggacactaatataggagaaataaattatggtttatttataataaaaatggacaatataataaaaatggacaataatataggagaaataaattatggttttctaatgcacagtagagtgattatagtttataataatgtattatatatttcaaaaagttagaagagaggaatttgaatgtcctcaccaaaaagaactgataaatgtttgaggtgatagaaatgctaattactctgattttatcagtatataaagtatctatgtattgaaatatcacactgtaccctaaaaaatgtaaaatcattacatgtcaatcaaaaataaaataagtttatacaataaattctagtccatattatattttctaaaatttcaggaaagaaatactccaatggcccaaatacaaaattaaaatggcttaatttccaaaaactgttttagtgctatttaactaattttgtttaaaatctgttggctgataagaaatccagaacattaattaaattcaagagctagtcaaaagaatattttctaaatgaaaactattttatagaccatagacttccagaagaaaatataccaaaacatgaacagtagctatttctaaacagcctggaattttagttattttttaaacttttctgtatattctgtgaaatctattacttttataattaaatatgttacttggaagcataaacttttatgttttccattagtattttatgtagcttacctttttttcccagtcattatttagagattccgtactttgttcacatatctttttcagctctgcaatctggtcttctttagtctctctgataacttgacagtcacgtatcagtgtctgaactgtcaaaaattttgaaaacatagttaaaccaattctaggtacatagagtttgatgatataaaatttagtgcaccagttagtaggtaattcaatttttcaccaagtcttctcaatgctttcttctaaaatatcttttattccttgctctttttctcgatttctaccaccacagacagccttggttaaattcatcattactggctccctagacaattgtaacagtgtattggtctcaagcatcattcccctccaaggagtcctctgttgctttgaggaaatctttcaccattattctaagtgaagtaactcaggaatggaaaaccaaataccatatgtttttacttataagtggaagctgagctatgggtatgcaaaggaacacagaatggtataatggactttggagattgagaagcagggggtggaaaagggggtgtgggctaaaaactacatattggatacaatgtacattacttgggtgatgggtacaccaaagtctcagacttcaccactgtacaatgaatccatgtaaccaaaaccacttgtaacctaaaagctactgaaattttaaaaatttaaataagtaaagaggcctttcactggtgcaaatctggtagttatgcccaggcttacaaacgttctacagctcttctcatctaaaagataagtataggtcaaagcctctgacatggacaagagttcctcatggttctggccatatctcttcccacttgcatgttttaaaccactattataaacacaccaacctatatgcagattcctgagttcatattctttcttatatcactgcctaaatatgatcatctatctacatagaatgcccttccctcccttattgaaaaactcctactcatccttagactctcaactgaaaaatcacaccttctttatgaaccagtcataaagaatcactaaatcatgattcactcaaccagatttctccccttgcagggacagaaagaaattcctctttattcccatgaaaccttgagtatttctcaattaaatcatttattaacattatagtgatttacttgcctgtttcctctttaatgagactatgttcacggagaagaaagagatttcaactttttatccacagggcataacagtgccacacaggcaagtgctcaaaaagacgtgtactgaatgaataaataaaggaacccctcctttcaatatattgttgctgctagatacttttaaatcatttttgaagtttatgttactaaaatgaaataggttttaaattatataaaatatttgccttataaatcatttctctatcttctttactaaaattatttaaacagtcactgatttaagtgaaaatgtgtttaatatattcatctcttctggatagtaaaataaattcagctctatttttaattggatataatcttatcatagcttactaaatatgtttttattcatttacttcgagacagcaaaatttttgtaaacatttccctaaaaattgttttcactcttatatctcaactacacaacaaataaggagaggagatgaatccaagttaacctaatgtgggtctttaccatctacaatatattttactttacacttccaaaattaaactaagatctgattgcaattcaaaatgcctttagaaacattatttttaaaacctcatcatttttaaaccttaggcatgtttgaattacctattttgaatcagggtaaagaagaagacctggaaataaatttaaaatatttttctagacactggtaatatttggagaaaaaacctaaacgaatttataattgcttttaccaacatttaagggtggaaatgaacctacaaatatttatttaattggttaacttatctatgtaatggctgtcctaatttgtcaaagccattatcattcactcagatatactcaggtttgatctgggggagagccagtaagttccatacagaaaatcctaaatgaaaaccttcccttctccttttctcttattcattgcctagatcttctcattcactaaatcatgattcactcttaaaaacttcttcttttcttcggttccattctaactactcccagcgccatcattcagaaatccttctcaccttaacatgcaaaattacagcagcacagaagcagaacatctctgagttggcagggactttatatattatttattctgatctcaccattttataatgagtaaaccaagacccagagacaacttgctatcatacatcggacactggtaacagagctggaattacagcctatgttttctaataagtagaattctctctccttcactccattctgcctctgcctaacagacttggaattggcctactctgttcaatacaccctccattaccaggctactcctcccaaaacatgaggtcctaaaactcacatctcaaaatccttccctggctctttacatccagcatctacaggacaaagttcaagcttctaaatctaaaattcaaggtcatacttaatctagccccaagtcaactatcttaatattttaaaatcttttttttttttttttctgagacggagtcttgctctgttgcccaggctggagtgcagtggcacggtctcggctcactgcaagctccacctcccaggttcatgccattctcccgcctcagcctcctgagtagctgtgactacaggcgcccgccaccacgcccagctaattttttgtatttttagtagagacagggtttcactgtgttagccaggacggtctcgatctcctgacctcatgatccacctgcctcggcctcccaaagtgctgggattacaggcgtaagccaccgcgcccggcctaaaatctatctcttaatgcatggggtatccattctagctaaatagttgagaagtacccttcctacaacttacctatttcagcattcccatcccagtacctgcaactcttctctccaactaaccaagactttaaaatttcacaaaattttacaaaagttcctttcccaaaacaatattttcaacactctctctcatgaccacctattgatgtagatgtttcgacccataatcatagtcaactacggtcagagttagctcaagtggttacctcctcatgccggactttccatctgtccatagtcaacttaatacttgattacatgctttcttttccttcttaattaaagtgcaaataggaaatacattttaatttttttctgtcaatcacaataccagcaaatactatcagacataaaagtagatacttaatgtaatgaattttactagataaagaagaataatttcctttgacttcctcatgaaggccagtaagtcctaattctatgactgccctcaatactctatggcagctgtatcccaatgaggctagagttaagaagagggagtgaaagcaacatactcttccaactctgtatctaaaccaaccaccagtactactccatcactgtcactacacaaacacacacacagacacacacacacacacacaaataaacacagtttttgccccttcatatggaagcctatataaatatatccactgatgaaaccccacataaacattcctatctcatactataaaaggtcagaaatcaaatttttttctccacatcactaaaataaaatggaaatgttattaaaagatgtatgtaacaacacaacatcacctttcttttcaagctttctaatagtctcttcagtttcatgttgtttactcctgtataaagttttcagttcttctatttcattattctttctttctaaaatctgcaaataaatttaaaatatttcagtatattgtactactttacatataggacacttttttgaatcctgatatatttaattctaaaacataaatagaaaaagtgattttaacaaatatgactacactgtgaaattataaacacacacacacacacacacacacacacacacacacacacaaagtagtatctcttatccacagctttactgtctgctgtttcagttagatgcgtgtgtttttgtgtatgtccatgttaataattctagcctagtcagaagttcacgttttgctcttgcagcagctaggaggtagaatctatatgatctgccacacttggaagcttccaagttgcctgaaatcgtgagactttcctccttttgactagtgaatattgccgcaaattggcattgtagtgatttaagtgactttttaaattgattctcaaatgtcagtgttttgtaaattaggtagaagtgttttgtcctgaaagggagttagggattctttttctcagattagcataaaaatagctgaaattgtatgtgtctaatatttctcttcacatatttttcttatacttacgatatctactgttgtttatctgctagcaaattccagcagataataagtgaatggtgaattagtaggtatacattaatagaaactcgtaaagaaccaatcatataacttttcaatgagcataatatttttgtaagtctatctcagctaatctcataaatggtttccccccaaactgtaaaaattatattatagtgcattaagaaaattattaaatatacaagaataattattatctgaaagaaatacgttatctgagatttttgtataataatttttaaggacagtataaataataatttcagtgattccctaaaatataattcagaaattaagctgtcataaagtggcagagagaagtcatcagaaacttgccaggttgggagagtataattcatcacattgcactgggatagaatattcttcagctgggcatgtccctggatccgcccacaagcaccgttctatcctcctagtgcacagtaaaagaattcccagatacatgaggagatgacatgtaatcagcctcctttatatctagctctgctactgtgaatcagaaaaatcagctcaaaatatgtcaaaaattgcattaaaatctattgttaatttatattatgtcagaagttttaaatgtaatcatttaataaaatttgtgattttatacttcaaaatacatctatactcacaaaaactacagaaataaccaaaatgtaaaaaagatagcaagtaagagaaaatgctaatcaaggggaaaaaggaatatctacttttcttatggctggggtatatttcccatacacccaaaagtcagcttaacaagaacaacagaaaagaacggggcacagtagcacatgcatatagtcagctactcaggaggcttacagatcacttgagcccaagaattcgaggctgaagtgagccatgatcatggatcatgcctgtgaatagccactgtcctcctccagcttgagcaacatagcaagatcccatctctggataataatagccataaagaagcaaaaaagaaaaagaatgtatactaataggtaaaacactctaaattttacgccttgccaattcctgatgcttagaaaatgccagacaagagtaaactgatgaatatacttttcaaatctagcataaaggattttatttatattttacttggcacttcaaactagttgcactgtctgctgcaaataaatttcaggatttattttaaagagaaattgctggaaagaattttattattaaatatgttactttgagtaaatctttgtaacagacataccaagaaacctatttcaaattccatcaccgtaatttttccaaataaatttttatattcatttatcttatacatcaatagactctatttcaattgtacatgttatattgaaattatattactgactctctaacatacttatgatagagaactattatctaaacaatttaaactaaagtaaaactctagtaagagcaaaaaaaatttgcctgtaatatctgaatgggggagaggaaattggaaaaggagagttcagtttttttttctctaatatccagtcagtggtttcctccttattgctttaaaggacaagccaaatacgtattttactaaatattaatatatatatattaagcttttaagaaagcttggatacataatcctgatgctgtaactactgcaactacctgcctctgtctctagtactcagttttgggaagcagaatcataggcttagttttgaaacattaaatgcaaagtttccatttggatcaacctccatgtatttcaaaaaaacacatacatacattattatcactaaatgttttaatcattactaaaatatagtaacaacccaaatcccatataggataaccataattaacaatttttgctgtgccagctaagaaaaaaaaataagttttatttgaaaatacaggctgaaagattagaaagcatcaatcccaatgagctacttgaaaaacaagcctttattgtcagtgccagcactaaaatgcatacaagtccaagagctcctttttaaattaaaaaagaaatttaattaccagaaaaccaaaagaatattagaataaaacaaattctagtatttaccattgatgtcttatttcaactttcatgaaaggtaatgacagaatgcagataaaagactataagaaggtcagcctaaatgcaatagttaaagaaggactaaaaggtaatgtaaatataaggttttaaataaacacatatgtttagctaataaagttaaaaaatcaacttttgctgggatattagtttagcatattccacttataacagaatgtcataaagtacataaataagtggatggatggttggaagaatggatggataactggatggatcatcataaaacctagaatatttttagtgttcaatataattaaaacacgagatatatatcctaccttctgaacatcagcatcatgtttctgttgcagtttaagcttttcttcatgaaatttagcttccatcatttttgttttcatgtccagcttcaagaaaaatatttcaagggtgttattaatttactttccctttggcaaaaaatacacaattaaactaaaataattccctataaaaaagacagttatcattttccacctttaccttgtagtcacagattctagcaatcacattacatataccaatatgtttatttcagtcctctaattactttcaaactagttaaaagtctttaaaataaatttcacctggtaggcaaaactgacaatatgaagtacagattcactactctccccattctctcccgcacaaaagagaaaggcattttaaagtgatattttgcttttacatttaaatccacacagtattttactcttcattatttttcatttcagtaagtctcttccaaccttttatttttttttctttgatctacttgctcattttaaaatactctaattaacctacatatgtaaatatgacttgagaatgaatatccataaaaatggcaaattactgattagtgcatatctttcgacagtttttcagttctctctcccggaatcatagacccccgctccctcaagggagtgactttatctccttccaagcattccttaacttctatcctctccaaaccaacaccacatgcaacggtgctctgagcaaagccaaaaatgtaaccaatcttcttaatataagaagggtatcctagaattaaaagagcaatagtgacaggtttcaagaagagcaacataaaattgattatctcaaatgtgaaagtatttggtcacatgattcctcacaatttaagagagttaagtgttatacattggagtctggcagacctcttttccaactctaattccaatcccaccatatatgcactgttgtgactttgagcaagtgaccctttgacactctagttcctcttctgctaattaaggaaaagtatccttacctcagtggattgtgaaaatcatattcaataaaataatttaaatgaccatacccaggacaatgtgtggcacaaagtaagtatgcaaaaatatcagtcaaccacatttaggaaaaacattttaatattattaatgtaccttcaaaatattttcttgaaaatttttgaaatacactttatattttcaattactttttcaaatacaaaataaatttagcaagataaacatatatatcatattaacatatcaaactgagattttatgtttcacaaacaaaagttaacataatacaaattcatgacttaaatgttatgaatggtggagaaagagacagttaaccatttgctatgcaaaaaaaaaattcaattcccttgcctctaaatcacacaatatttcttcttcgtttttgcagaaaggaggctagacaatctaattccatgtaaagatccttcacagaagcatttttggggtctattaaaagggaactaaagccaaaaaacagtatgacaaagctggccaggtctaagagacatgattcattgccagatcttcccataacaccttctagagaacttgtcataccctcagcttttgagggtaagccctaaataccatgtgagtgtgctaccataaccccaacccaacacctctcaccggccctacctcattatttattgaccaagttaggaataaatacctgagatatgcttaagcaatccattagctagcaaaaaatcattcagattctctctcaagaatctgaactaacacaccaagttagctattttggggagcaaacccaagttctaaagtgcagcaaccaagagaaagcaggccaatccagtatatagaaaaaagtagagcaaatacacaaagattagaaatcacatagcatctgaaatacgagggaagcaaactcaggctccaacaatctcaatgacactagggttagttgaactcaaaaggatttttgtgtatctttttattttatgtagcttgatggatctctgttcttacaaccaaagatatttatctaaattctattcttctggttataactttttgccttggcataatattaaacttaaagaaaagttgcaataatagcacaaggaactcccacatgccctttacccagatttaccaattttttatattttgccctatatgctttgtcattttatgtctatatctacctctctatatatataaatgcatacatattacttcctcaattatttgtaaattagaagcatcctgcctctttatccctaaaaacttcaatatatatttccttagaacaagaacactgtctttgataaccaaagcgtggttatcaaattgaggaaatgtaatattaacacaatgatattatctactgcacagtttatactcaagttttacaaattatcacagtaatgtcatttatagctattatttttcataatccaggatccaaccaagaatcacgcattgcttttagttgtcacatcaactatttatttctcctttaatctggaacagcctttcttcgtgtttagtgaccttgacattttttaagagtacagaccgttattaaatgtctctccattaggatttgtctgatgtttcctcatgactaggtttatgagattttggcaagaatgacactaaagtgatactgtgtcctttttcattgcatcatattagaaggaggctagtttgtcccaatatctccaatgtacagctcagtaacttggttaagacagtgagcaccaagttactctaagggtaatattacaaagaaagtctctccactgccatccttttaaaaagttaagagtatctcatctctggaaactcttaccttgatgctacagaatacctctatatttccaccctgtactctaaagtagaaatcctggatgtattatgtacaactagggcatgatgcctgatgaaacatcaggattagaatatagaaacaatcttgctactatattatataaagacagtataaggatgcagatttagatatagatgtagatataaatatagatatgtacctatgtgttcatctatatagtctgaaattgaaaaacatttctaattagtttgacctccaaggaagcctgacttcaaaaaacatttaagttttctttttctgacatcagaatatacattatcaatttcaaatgtaagatgtaaaaattaggcttgcagatctacttcaggctataatgaagcagggtaccacactaacctcccactgttaaccataaaatgggataaaatatatgagataaccattctcaagtattggacaataggtaatgcagtactgtgatcctcaagaattgaagaccacgatagtcccaactttccgcctgggtacaacaactggagtccatgtggagcaccacaggcctactgagctgagaaagcagaggtcagagttctgagcagttaaagaatcttaaatgcagggtactaaaagaggtataagcttcccagaagatttccctgtcactcctcaaccacaggctgatggctgggatgtgtgcaccctgggtgaataacaaaacattactgctacaaagtagaaaatgtaacagctgctacaggttaaagtgctgggaagcaccaaagacctgcccagccaggtggagacagcttcctaacaacttgcaaatacctgggaattcagctgaaacaacataaaggccacaccttaggactactctaaacctacctacaaggactgaaagcaagcctcagaaagatagtttgtaagacaggtcccatggtgttggataatatctttggctttctatgtatttgccttaacagaatgtaaaaaccaagtctacacaacttaaaggtgattaactagtaattgaacagcctataagaacaacaacaacaaaaaaattctatggagaaaaataacagaatccagagtccctacaaggtatcaaccacaaggtcctttatctagaaagtaataaagatgcaccaaaaaaataaaaaagaaaagaaaattttgtccttaggcaaaatcaatataaataaataagttaataaggcccaagatgactctacttcagcacaccacagtttaaagaagttcatataaataccttcaaagaactaaaggaaaacatattcaaaaattaaaggaaaatattattttaatgaaagaacggataagggatctcagcagatagatggaaattataaaaaggaaacaaatgaaaattccagaatcgaaaagtgcaataattcaaaggaacaaaaattcactagatgagcttaatggattagagagaacagataaaggagtctgtaaatttgatgacagaacaagagaaattatctgacagaaaaaaagattgaagaattgatttttaaaaatcaataacactttggaaactgtgaaacaaaatccaagagtctaatatacatgtaattggggttcctatagaagcaaataagaatagggaaagattatttaaagaaataatggccaaaaatttcccaagtttgataaaatataaaaatactgacttagagaacaagatgctcaatgaactctatgcaggataaatgcaagaaaacaacgcctagaaacatcacaaactgctgaaaaacaaaaacaaaaagaaaaatcttggctgggcatggtggctcacacctgtaatcccagcactttgggaggccaaggcaggcagatcacaaggtcaagagttcgaggccatcctggccaacatggtgaaaccccgtctctactaaaaatacaaaaattagctgggcgtggtggcacgtgcctgtagtctcaggtactcaggaggctgaggcaggagaattgcttgaacccaggaggcagaggttgcagtgagccaagatcgtgccactgcactcaagcctggtgacagagtgaggctctgtctaaaaaaaaaaaagaaaaaaaaaaaaaaagaaaaatcttaaaagcagccagaggaaaacaggcattacattcagagaaacaacaggctccccaacagaaacaatggaaaccagaggacaaaggaataacatcttagaagtgctaaaagaaaaattcagatgacttaactcatcaccagtagaactgcactaaaacaaatagtaaaaggtattcttaaagatgaaaacttagaaactctgaaatgaaggaaagtactagaaatagtatgtgagcagagatacataaaagccatttttatcttctcacaattccccaaaacacaactatttaaagataatacaacaacctcaaaagttaggtttcataaggtatttagaactatgacaatagcacaagtgattgtagggttaaattagattatactgttttaaagttattagatttatgaggtggaaattagaaaatgggaaaagtccagtgtaagcggcacaatattgacactaaaaattgactttgatatggtaaggatgcataattttagcccaaaagcaaccaataaagaaaacatacaaagggaaagtatagccaagaagtcaatagaaaaattaaaatagaataacaaaaaaataactaaaaataaggcaagaaaggagcaacagagtagtgaaaaataaaaaaagggggtaccagtggaaacgaacaccaacaaggtagattaaacctaaccatatcgatcagtaactatattaaatttaaatggactaaacactctaattataagagactgttaaaaaattagcaatgggatcttgaatgggaatcattatggtggatgagaggcatgaggactagattgcagctccaactcggacagacagagcagtgtgcagaggcttgcatcatgaattttagctcaagaatgactgcaagaatgaaccaggaaccccgaggggacccccagaccctctgaaggaagaggactgctcctgcaggacgcgggagacaccccaaatactgtgagttcccaaactgcagaagtgggaaagggagaccctccattcccaaacacacacccccactgggaaaactcaaggtctggtttgcaggagacatttccgaccttacccacagctgggtcaatttagagggctgagtgaaatacaggggtagaggaagtagtaggaaaggccctgggagctcgctgggtccccaagcaggccattcctgcctggtaccacagggaccttttgcgagggcagctagaggcatagggggaaataccacagagagaaggaagtctccagctgaactttgtaacaatttgaactgggcgagaaggctctgggccagaactcagagaaaggtgcaaacccagtgtgcagactccacaggcggcggggtaagaaccaaagccctcttcttttgcagctgggaactaggtagcctggggcaagttctccagccctgctcacccactgcctggaaatagactcggggctgctagggggacatggtgggggtgagaccagccctgaagactgtgtgggagctgggtgagagctgtgactgccagccttccctcacttccctgacaacctgcatgactcagcagaggcagccatattcctcctaggtacacaactccattgacctgggaacctcacccctatcccccacagcagccacagtaagagctgcccaaggagagtctgagctcagacatgcctagccctgcccccacctgctgggccttccctatccacactggtagctgaagacaaagggcacatactcttgggagttctagggccacgtccaccactggttcctctccatagtaccacagctgatgctctctggaaagtgtcaccctctggcaggaggccaaccagcacaaaaatagaactgtaaaccactaaagctaagaaccctcacagagtccatttcaccctcatgccacctctaccagaacaggtgctggtatccatggctgagcaattcatagttcacatcacaggactctgtgcagacaacccccagtaccagcccggagccaggtagactcgctgggtggctagacccagaagagagataaccatcacttgcagctcagctcacaggaaaccacatccgtaggaaaagggggagaatactacatcaagggaataccccgtgggaaaaaagaatctgaacaacagccttcagtcctagacttttctcagagcctacccaaatgagaaggaatcagaaaatcaactctgataatatgacaaaacaaggctctttaacacccatcaaaaaaatcacactagctcaccagcaatggatccaaaccaagaagaaatccctgatttacctgaaaaagaattcaggaggttacttattaagccaatcagggaggcatcagagaaaggtgaagcccaattcaaggaaatccaaaaaaacgatacaagaagtgaagggagaaatatttaaggaaatagatagcataaagaaaaaacaatcaaaacttcaggaaaacattggacacacttagagaaatgcaaaatgctctgcaaagtctcagcaatagaatagaattgaacaaaaagaagaaagaaactcagagcttgacgacaaggtcttctaattaacccaatccaacaaagacaaagaaaaaagaataagaaaatatgaacaaaggctccaagaagcctgggattatgtgaaacaaccaaacctaagaacaatcggtattcctgaggaagaagagaaatctaaaagtgtggaaaacatatttgggggaataattgaggaaaacttccctggcctttctagagacctggacatccaaatacaagaagcacaaagaacacttgggaaattaatcacaaaaagatcatcacctaggcacactgtcatcaagttgtatattctggttattagtccattgtcagatgtatagattatgaagattttctcccactctgtgggttgtctgtttaccctgctgactgttccttttaccgtgcaaaagctctttagtttaattaagtcccaaccatttatctttgtttttggggttcttgttcatgaaatccttgcctaagccaatgtctagaagggattttccaatgttatcttctagaatttttatagtttcagttcttacattaagtccttaatccatcttcattgattttcatataaggtgagagaagaggttccagtttcattctcctacatgtggctagccaattatcacagcaccatttgttgaaaagggtgcccctttccccactttatgtttttgtttgctttgttgaagatcagtgggctgtaagtatttgggtttatttctaggtcctctattctgctctattctgtgcttttgtatcttttttttttcttttcttttctttttcttttttttttttttgagacggagtctcactctgttcccatgctgaagtgcagtgacacgatctcagctcactgcaactctgcattcctggttcaagggattctcctgcctcagcctcccaagtagctgggactacagacatgcgccaccacgcccggctaatttttgtatttttagtagagacggggtttcatcagattggccatgatggtcttgaactcctgacctcatgatccacctgcctcagcctcccaaagtgctgggattacaggcgtgagccactgtgctcgggaagttttatatcttttatgtggagcatttaggccatttacatgcaatgttagtattgaaatgtgaggtaccattgcattcatcatgctctttgttgcctgcatactttgggttttttttaatttttgtttttgttttttaacttgtatttttgttttacaggtcctgtgtgatttatgctttaaagagattctgttttgatatgtttctaggatttgtttcaagatttagagctccttttagcacttcttgtagtggtggcttggtagtggcaaattctctcagcatttgtttgtctgaaaaagactgtacttgtctttcatatatgacgcttagtttcactggatacaaaattcttggctgataattgttttgtttgaggaggctgaagatagggccccaatcccttctagcttgtaggatttctgctgaaacatacgaggggccaacgaacatatgaaacatcactaatcatcagagaaatgcaaatcaaaaccacaatgagatgcaatttcacaccagtaagaatggctattactaaaaggacaaaaataataataataatacttaacatactggcaaggctgctaagaaaaaggaatgctgcggggcacagtggctcatgcctataatcccaacactttgggaggctgaaatgggtggatcacctgaggtcagtagttcgagaccagcctgatcaacatggtaaaaccccgtttctactcttgcatatgtatatcaggatacacacacaaggttattcatagaattattatttgtaaaggcaaaaaattagaataaagtttatcaaaaaaggcaagaaatatgacattcattaaatagaaaacagtgcaaacaaacctattacaactatatggcacaacaatgcctctaacatactattgagcaaaagaagcaagacataaaagaatatgaaaagtttagttctctttgaacacaaacaaatgaaaaaacattccatgctcatggataggaagaatgaatattgtgaaaatagccatactgcccaaagtaatttatagattcaatgctatccccatcaagctaccattgacttttttttcacagaattagaaaaaactactttaaatttcatatgcaaccaaagaagagcccatacagccaagacaatcctaagcaaaaagaacaaggctggaggcatcatggctacctgacttcaaactatgctacaaggctacataaccagaacggcatgttcctggtaccaaaacaggtatatagatcaacggaacagaacagaggcctcagaaataacgccacacatctacaaccatctgatctttgacaaacccgaaaaaaacaaacaatggggaaaggattccctatttaataaatggtgttgggaaaactggctagccataggtagaaaaatgaaactggactccttcctaacacctcatataaaaattaactcaagatggattaaagacttaaacataagatctaaaaccataaaaaccctagaagaaaacctaggcaataccattcaggatatagacatgggcaaagacctcatgactaaaacaccaaaaacaatggaaacaaaagccaaaattgacaaatgggatctaattaaactaaagagcttctgcccagcaaaagaaactatcatcggagtgaacaggcaacctacagaagggcagaaaatttttgcaatctatccatctgacaaagggctaatatccagaatctacaaggaacaactttacaaatttacaagaaaaaaaacaaacaaccccatcaaaaagtgggtgaaggatagaaacagacacttctcaaaagaagacgtttatacggccaacaaacatacgaagaaaagctcatcatcactggtcattagagaaatgcaaattaaaactacaaggagataccacctcacaccagttagaatggccatcattaaaaagtcaggaaacaacagatgctgggaggatgtggagaaatagggacacttttacgctgttggtgggagtgtaaattagttcaaccattatggaagacagtgtggagattcctcaaggatctagaaccagaaataccatttgacccagcattcccattactgggtatatacccaaaggattataaatcattctactataaagacacacgaacatgtatgtttattgcagcactgttcacaatagcaaagacttagaaccaacccaaatgcccatcaatgatagactgaataaagaaaatgtggcacatatacaccatggaatactatgcagccataaaaaaggataagttcgtgtcctttgcagggacatggatgaagctagaaaccatcattctcagcaaactaacacaagaacagaaaaccaaatactgcatgttcttactcataagtgggagttgaacaatgagaacacatggacacagcgagaggaacatcacacactggggactgtcagggggtagggggctaggggagggatagcattaggagaaatacctcatgtagatgacaggttgatgggtgcagcaaatcaccatggcaagtgtatacctatgtaacaaacctgtacgttctgcacatgtatcccagaacttaaagtataataaaagaaaaagtaaaataaaataaaaaataaaaataaataaaaagtttagttctcttcatataaagttcaaaatctggtaaaataaaaatatttcaattttcaaagatgcaggtattaatgctaaaatcaatattaaaacaaataggtgaaaattatcatcagaaaaatcagaatagtggttacttctaggaaagatggaagagaatatgattacaaatggtcagacagcaggcttcttaggatattggcaattatctaattcttgcctgggtggcatttacaatggcatttctttgtacaattatttatcaaattatgtgacattatgcatatctgaatgctatgtttcatatgaaatctataacagttctgtcatttattatgtcaataactgtggctttctttatcctagagttatttaaattatatatttgactagcagactcacagacaaaaaaaaaaaaaggcctaattccaagcgcagtggctcacgcctgtaatcccagcactccgggaggccgaggcaggtggatcacaaggtcaggagttcaagaccagcctggccaacatggtgaaaccctgtctctactaaaaatacaaaaattagccggacatggtggcacgcatctgtagtcccagctactcgggaggctgaggcaggagaatcgcttgaacccaggagacagagattatggtgagccgagattgcgccactgcattccagccttggcaacagagcaagactccatctcagggggaaaaaaaggcctacttggcattacacataataaagaagcaacatctctttttaggcaatagatggaaacattcaatatgggtgaaaagaaaggtcaaaggaaattttctattttatttcacaaaaagagtaattttttactccggtttctcttcagattgtataaatctttcgccttttaccaaaggagcaatttctaccatctgttctctgaaaaattgacctcttcttgttgtgttgtctgttctttcattttcagtgagaaaacttttccaaatgtcataatgtcaaaaagcctttcttcagattactaaaaaaagaaagaaagaaagaaagacccgttgcttgatgatgctcactgtcacacaattctgtgatgtggatatcagagaaaatgtgttagcaattacaaaggcaagcaagtccaagtatgtttgtgaatgataggctaaagttaaaataaaggatcactgtcactgaacatgttttcccataacatatgagaaatatgcccaaaataaattgaaaattgttaagaacatcttaaaatatttaatatgtgggtcaggtgcggtgcctcatgcctataatcctagcactttgggaggcagaagcagtggatcactttaggtcaggagttcgagaccagcctggccaacatggcaaaaccctgtctctactaaaaacataaaaattagccagatgtcatggcgtgtgcctgtaatcccagctacttgggaggctgaggaacaagaattgcttgaacccaggagacagaggttgcagtaagccaagactgcaccatcgtactccagcctgggcgacagagcgagactctgtctcaaaaaaaaaaaaaaatttttatatgtgtatctgtagccaccaaaacaaaccactataattctttaactccaataaaactagatattaatattaatattaatattaattagtaaattaggttaaataaccattaattctattagtaattttacatattttactcatgttaacatctaagtatcttctgaacaatatgaatttaaaatggaagttgtattttattaaatagctccatttctaaaggctaaatattttaagactcactaaaacttcaacaaaattaaatactttaataaatccttcatgactgatatggtttggctgtgtcctcacccaaatatcatcttgaactgtagctaccatcattccaatgtgttgtgagagggacccagtgagaggtaattgaatcatggggaaggattttcctcgtgctgttctcatgatagtgaataagtctcatgagatctgatggttttataaagggcagtttccctgcacatgctctcttgcctgccaccatgtaagatgtgcttttgctcctcttttgccttctgccatgattgtgaggcctcccagccatacagaactgtgagtccattaaacctctttttcgttataaattacccagtcttgggtatgtctttattagcagcatgagaacggactaatacaatgacacagataaactctataatctgtaaaaaattggtatcaattaattatctccagacttactggatcctttaatataagtatttcaaactcctaaatttttattttataccattaagaactgactaatgaggtcaggcgcggtggctcacgcctgtaattctagcactttgggaggccaaggtgggcagactgcctgagctcaggagttcgaaaccagcccgggcaacacggtgaaaccccgtctctactgtaaatacaaaaaaattagccaggcgtggtggtgagtgcctgtagttccagctactcgggaggctgaggcaggagaattgctcgaacctgggaggcagaggttgcagtgagccaagattgtgccactgcactccacactccagcctgggtgactgagcgagactccatgtccaaagacaaaacaacaaaaaaagaactaacatagattactatcagtatttacagcaaaacctctgaaagagatctaatatttaaatagaaaaataaaatttttaaatagacaaaaaagaggtaattttttgttatgttggaaggtgaaaggcttttgtaagcataatacaaaaaccagaagcctagagaaaaggctgacagatgcaactatttaaaaggaaacttctcatgcatatcaaaactaccaggagatatcatttcagtccagttaaaatgccttttatccaaaagataggtaataacaaatgctggcaatgatgtggaaaaaagagaacccttgtacactgggttggtgggaatgtaaattaatacaaccacaatggaaaacagtttggaggttcctcaaaagaaaataaaaatagaactaccaatccaccaatcccactccaaggtatatactccaaaaaaagaaaatcagcatattgaagagatatttgcactcccatgtttattgcagcactaataacaatagtgaagatttagaagcaagctaagtatccatcagcggatgaatggataaggaaaatgtggtacacatacacaatggagtactacccagctattaaaaagaatgagatcctgtcatttccaacaacatggatggaactggaggttactatgttcagtgaaataagccaagcacagaaagacaaacttcatatgttctcacttatttgtgggagctaaaaattaaaaacaattgaactcatggagatagagagtagaatgatggttattaggggctggaaagggtagtgggaaggcagggggggagttgggatggttaatgggtataaaaagtagaaagaacgaagaaacctataatttgctggaacaataaggtgactacagtcaaaaaaaaaatttaattgtacattttaaaacaactaaatgagtatagattgtttgtaacacaaaggataaatgcttaagatgatggataccccatttaccctgatgtgattattatgcattgcaggcctgtatcaaactatatcatgtaacccacaaatatatacacctactatgtacgcacaaaaattcaaaattaattttaaaaagttaaaaatagaagaaaccttctctacactaaaaagtagcacaaatcaaaagatattcacagagaaaaatatttgtaagacatacaaaaaagaagtgatactttaacatgcaaattgctcgagtgttaataacaaaatggaaaaagaggcattctctataccattaatgttaacttaaatagacataacccttcttaagttttactgaaatataatttatatatcataaaattcacacatttacacaatacaaatcaaaggtttttaatataacagagagttatacaaccgttagcacaatctaattttagaacattttaatcatcctaaaaagaaactctatatccactagccaatactccatacactcccatgcctgcagccctatgcagacataaccttattttaaggacaacttgtcaacgtcaatctaaaatgcaaatgtgccatcctgtgactgagccattccatttcacatcatttattctgcaagaaaagacacataatacacaaagatatgcataggggtattcttgaaataccatttgttatagaaaaatactctaaacagcctacatgcatcaatagcaaattatattcataaaacatgatgtatcagtaaagtaaaatttatgtaattatgaataagaatggggtgatatttctgatatggaaaaaatcatcagaatatatatgtcagtcaaaaagcaatgaaatgggctgagcacggtggctcacgcctgtaatcccagcactttgggaggccgaggcaggcggatcacgaggtcaggagtttgagaccagcctgaccaacctggtgaaaccccgtctctactaaagatacaaaaaatagccgggcatggtggcgcacacctgtaatcccagctactcaggaggctgaggtaggagaattgcttaaatccgggaggtggaggttgcggtgagctgaaactacgccactctactccagcctgggtgacgacagagcgagactccgtctcaaaaaaaaaaaaaaaaaagcaatgaaatggtctatatacagtatatgatctaattttacttaaaaagaaataatcctagagaattttaaagagaatacccattaaattttcagcaataattatctctgaagaatgagttgagaaagggatgattaaatacttgagagctaatatttaattttaaataaagttgactcacttaaaagaatgctatttattgttttaaaaatattacccagcaacaataaaggcatttttagatgagaacatgcacaagagttgttttatagggacatgtaaggctctaacaaacttcgaaacagaacagcatttatcctcatgccaacaattaaatgttgaataaaagggatttaagcaagtagacataagattttcttttctttttttttttttttttttttttttttttttttttttttttgagaaggagtcttgtgctgtcacccaggctggagtgcagtggcgtgatctcggctcactgcaaggtctgcctcccggggtcatgccactctcctgcctcagcctcctgagtagctggaactacaggcacccgccaccatgcccgagtaattttttgtattttttttagcagagacggggtttcaccattttagccaggatggtctcaatttcctgacctcgtgatctgcccacctaaagtgctgggattacaggcgtgagccaccgtgcctggccataccaattttcttaaggaaaacatatgtttatagaacacatagagaaaagaaaaaaaaacgtaaatatattaccagtattttttatttctaggtgttgattctataggtgattttatttccctccttacatatgtctctatttcccaaaatgtctttaataaaaatctacataatttattttataatcagacatgctactttaaaagatagatgaaactaagatagtttttacacaggggcaaatcagcagatacttttaaatattgtgcaatggagaaaaatatgataaaaaaacttcatcaaaataagtcagaaatgactgtaattgcacaaaggattattttagaaaaatgtacactgaatatattttaatatatggaataagtttatgattacatgcaaacttctcaatgatgcctcaaatatttttatagtatgcccaaaagaaaaacagaaacataaggatttaggaaaaaataaagtcaaacacatttaaaaatgaatttctgatgcaatgcatgatagctttaaatgttttttctttgaaaacatatgtgggtggcattggtatgctgactcctgccccaagttgtcatcaacaaaatttttaagtgatgatttcctttcaattcatttaattatttatggtaagcagtctcaacagtaagaattaatacaaaataaaattaaaagaaaaaatagttgggaatgactcaaaatgatttttataattcatgaatgacaatttttagaaaaagaaattcaaaacaagagctcaaaggacaaatatgctttttaaaatgtcatttgtttttatttcaacagtttttgtaacaccaggattatacaagaaagaaaagcctgagtctaatgtcagcaagatggcagactaggactttcaagccctcgtccctccacagaaaaatcaatttgaacataaacatgcacaaaaataccttcataagagctaagtaaacaaggtgaaatattacagcacgaaataggaaaagacataacgcagaatgtagaaaggacagttttactcagaagtccgaggctgcaggttttaaaatactcacatcacccctcccccaactccagacagtaaagcgtggagagaccctccacttgggaggagggaagaaaggtgagcactagactttacctcagacctcaataccaggtcagtcccagtaaaacgtaggatcaggcaggactcctcagccctagactcccagccagtaccccaggactgaccctgcaaatccaccctggtacaaggaaaaatctcacagccccaggctccagactggcccagtagatttagtccctgggtccacctcaccccaccccatgctgataccagcagccacagcatccaaactaaccctagtgctggactgaccccagcagcctaaacttcagctccaccccagagccagaccagcccctacagactaaggttcctggctagcctctgtagccccaggctccaggtcagctcccaagacccaagactccaggccagtacccacagactgagcctctaggcctaatttggcacaatgcaagatcccacagccccaggttccaaagccagcccagcagactcagtctctggactcaccacattgccaggcgggcccagtgaccttgggctccagactattcacagcacgaggctggccccgacaacttcaggtttcaggcctacccaggaaccaggccagcctccagaatccctagtcatcaggccagcactcacagactcagcctccatgctggcccatgtgaatataggctccagacatacccaatgtcaggccagcccatctggccccaggctccaagcataacgcaggattcagagccaggtcagccaacacaaccccatgctttagacccacccaacctcccagtcaacacctctggcccagactccaggtcggccactggggccccaatctccatattaacccctgtggtcccatacaccaggagactcagggtctagacctgactaacagacccagggtccaggctcatcccaataaactgtggtgccaagccagccctcagaaaataagattccaggtccatccctacagaatcgtgacccaggcccacccctgcacactcaggcccctggcctgtcccagtggaccaaagaaccaggtccatcccagaacctgtctggcccctgcagattcaggcttaaacccaccctagaaccaggtcagcccttgcagacctaggcttcaggctagccctggtggatacatatttcaggcttaccatgcagacccaaactccaagctcactcccatggaccaaagcaacacatctacccagtggatccaggctccaagctcaaacatgaggaccaagataccaggcccacccactttctgaccctgcctggggactgtaggagagagcccaccaataggccaaacagcctgcccagaatctctggataggctcaatgatgactggctttctcaaatgaagccagtctacaaagactataataatttcctacttcttcaaatgtgcagacaccaacataaagcaacaagcaacataaaaaaccaaggagacataaccccagcaaaagaaaataatctcccaatagctgaccccaaagaaatgaaaatatataaactgcctgacaaataattcacactaattgttttaaggaagcttagtgagcttcaagaaaatacagagaaataatttattgaaatcagaaaaacagtaagtgtataaaatgagaaatttaacagagaaattttttaaaaaatcaaattctggagctgcaaaatataacgaatgaaaagaaaaatataacagcattcacaactgaattgatcaagcaaaagaaaaaattcagtaaactcaaatatacaggttattagaaaatatgcagtcagagaagaaaaaggaaaaagactggaaaggaatgacgaaagtttacaggacgtatgggacaggatcaaaagagaaaatattcaagttataggagctaaagaagaaaaagagagacaaaggtgtagaaagtttatttaaacaaataatagctaaaaactttccaaattgagggaaagatatatatatcctggtacaaaaaggtcaaaagtctccaatctgatttaattcaagcaagactataccaagccatgttataatcaaactgtcaaatataaagaacaaatggaagattctgaaaatatcaagagaaaagcaaattatatacaagagacttccaataagactagcagcggatttcatggaggaaatcttacagtccagaaaagagtaggatgatatattccaagtactgaaagacaataactgccaaccaagaatattgtgagtggcaaagcagtctttcagaaataaagaaaagttaaaaatgtaccaagacacaaaaaagccttagggagttcatgaccactagacttgtcttacaaaaatgctcaagtgaaatcttgatgctcaaagaagaagacactaatgaataacaaaaaatacatatataaggataaaactcaccagtaaaagtaaggaaacaatcaaacacagaatagtctaataatataatgttgtggaaatgacttatatctttagtatgaagatattatattatttaaatataatagccacaataatttctttctatacaatataaaaagatgtaaattgtgtcatcaaaaaatgaaacagagtaaaatgtagtttttatatgtgataaatcaaggttattatcagtttaaaatagcctgtcatgaaaataagatgttttatgtaagcctcgtagtaatcacaaagcaaaaacctacaatagttgcacgaaacataaaaagaaaggattcaaagcataccactacagaaattcatcaaatcacaaagaaagataacaagacggaaaggaacaaatgttctataaaacaaccagaaaacaaattacaaaacagaagtagcaagtctttacttatgaatacttatgttgaatacaaatggattaaattctctaatcaaaagacagaataactgaatggattaaaacaaaattcaactatatgcttcctataagaaattcatttcatgtttaagaacctacatagactgaaagtgaaggaagaggaaaagatatctcatgcaaacggaaatggaaagagcgagggtagaaatacatcagataacactgacttaaaatcaaaattataaaatgagatacaggtcattatacagtgacaaagggctcaagtcatcaaaaggatataccaattataaatatatatgcccccaaagtaacatcacctaaatatataaagcaaatattcatagatataaaaggagagaaggagtgtaatacaataatagtaggggactttaagaccacaatttcagcaacggacgggttacccagaaagaaaattaataaggaaacatcagatttggtctattctttagtgcaaataaacctaaaagagatatacagatatacaaaatgtaccattcagtggccacagaatacacattcttctcaaccaaatgtgaaatattcttcagcatagatcatatgttagttcacaaaagaaatcttcacaaatttaagaagactgaaatcatatcaagtatcttttctgaccacatgtttaatactagaaatcagtaacaagaggaatttcagaaaattgacaaatacatggaaattaaataacacactcttgaacagctactatgtcaaagaagaaattaaaagagaaatttaaaaatatctacagacaaatgaaaataaaaacacaacatacaaaaacttatgggatacagcaaaagcagttctaagaaagaagtgaatagcaataaatgcctacatcaaaacaggagatctcaaataaacaagttaatgttacacctaaataacttctaaaagaacaatctaagtccaaagttcacggaaggaaggaaatcataaagatcagagcagaaataaatgaaatatagactagaaaaacaatagaaaaggtcagtaaaattaagagttagttatttgaaaagataaacaaaattgacaaaactttagctagactaagaaaaaaataagagaagacaaataagtaaaataagaaatgaaagagatgttagaattgatgccacagatatacaaaggatcatgaaagactactatgagtaattatacgtcaacaaattagatagcctacaagaaaggaataaattcctggacacacagaacgtatgatgactgaatcatgaagaaataaaaaagctgaagaaatcaataataagtaaggtgactgaagcattaatttatgtatttacttttttttttttttgagatgggagtcttgctctatcacccaggctggagtgcagtagtgcgatcttctcactgcaacccccacctcccaggttcaagcgattctcctgcctcagcctcccaagtagctgggattacaggtgcacaccaccacacccaactaatttttgtatttttcatagagatggggtttcaccatgttggcaaggctaatctcaaactgctgacctcgggttatctgcccacctcagcctcccaaagtgctgggattacaggtgtgagccaccgagtccggccttgaagcattaatttaaacacacacacacacacacacacacacacacacagatacacacacacacaacatatgcccaggacctgatggcttcactgttgaattctaccaaacattgaaagacctaataccaatcctcctcaaactcttccaaaaaaaacagaatacttccaaactcatattatgaggccaactttacactgacaccaaaactacacaagaaaacaacaagaaaggaaaattataggccaatattaaggatgaagatagatgcaaaagtcctcaacaaaatattagccaactgaattcaacagcacactcagaagagcattcaccatgatcaagtggaattcatcccaagaatataaagatactttaacatatgcaaatctatacatgttgtacaccaattaacagaatgaaggataaaaaccatataatcatctcagtagatgtggaaaaagcatttacaaaattcaacatattttcataataaaaacaacaaattaggtatagaagaaatgtacctcaatacaataaaggccatacatgaaaaacccattgataacaatatattcaacagtgaaaaactgaaagcttttcctctaagatcagaaatgagacaaagatgtccactctcactacttcttttcaacatagtactggtggtcctagccagagtattacacaagggaaataaataaaagggtggccaggcacagtggctcatgcctgtaatcaatcccagcactttggggcgctgaggcaggcagattacttgaggtcaggaattcaagacaagcctggacaacatggtgaaaccttgtctctaccaaaaaaataaaattatatatatatatggcacacagtggcaaatgcctgtaatgccagctactggggaggctaaggcaggagaattgcttgaacccgtgagacgtaggctgcagtgagctgagattgcaccactgtactccagcctaagcaacagagcatgactgtctcctaaataaataaataaattgtatccaaattggaaaggaacgagtgaaatggtctctatttacagacgatatgatcttatatgtaaaaaaaaaatttttaaagactccaccaaaatgctggaactaataaatgaattcactaaagttgcagaatacaaaatcaacatacaaaaatcagtagccattttatacactgacaatgaactatacaaaatcaagaaaacaatccctctcttactaggtaccaaaaaaaaaaaaccacttagaaataaatttgatcaaggagattaaagaccagtataatgaaaactgtaaaacactgataaaagaaattaaagaagatacaaataaatggaaagatatctcatgttcatgaactggaagaactaataatggttaaaatgtccatgctatccaaagcaatctatatatttcatgcaatccctatcaaaattccaatggcatttttcacagatataaagaaaaccctaaaatttatatgaaactaaaaagaccctgagtatccaaggcaattttgagcaaaatgaacaaaggtgaaggcatcacactacctgacttcaaaatacactataaagctacagcaatcaaaagagcacagtaactggcataaaccagacacacagacctaatgaaacagaacagggaacccagaaataaacccatacatttagtgtcaactgattttcattattattatttttatttatttatttattttgagatggagtcttgctctgtcacccaggcaggagttcggtgacacaatcttggctcactgcaacctctgcctcccaggttcaagcgattctcccgcctcagcctcctgagtagctgggattacaggcatgccctaccacacccggctaattttcgtatttttagtagggatggggtttcaccatgttggccaggctggtctcaaactcctaatctcaagtgatccgcccacctcagcctcccaaagtgctcaattacaggcgtgagccaccatgcttggccaggtcaactgatttttgacaaagatgccaagaacacacaatggggaaagacagtgtcttcaataaatgatgcttggaaaactggatatccaacatgcagaagaatgaaattagacccttatctcacaccatatacaaaaatcaatttaaaacagagacttaaatgtgagacctgacattttaaaactactataagagaaataggggaaaagctccatgacattgctctgggcaatgatgttttggatatgaaccgaaaagcatagtcaacaaaagaaaaaatagacaaatgagattatatcaaactaaaaagcttctgcatagcaaaggaaacaatcaacagagtaaaaagacagcctacacaatgagaaaaatatctgcaagccatatatctaataaggggttaacatccaaaatatatatggaactcaaacaactcaatggtaagaacactgataacctgattttaaaatgggcaaaggatctgaatagacattcctcaaaagaagacacgcaaatagccaccagatatatgaaaaactgcccaacaatcctaatcatcagagaaatgctgactaaaacaatactgagatatcacgtcacacctattagaacggctatcaacaaaaagaaaaaagatcagtattggaggggatgtggagaaaaaagaacccttgcccagtgttggcagtaatgtagattagtgcagccattatagaaaaacagtacgagggttccttgaaaaattaaaaatagaactactacatgatccagcaatctcactattaggtataaatccaaaggaaatgaaattgctatattgaagagctatctgcacccccatgttcactgcagcaatagccaagatatagaatcaatataaagtgtccatcaacaaataaatgaaaaaaatgtgatatatatatacacatacacacacacacatacacacacacacacaatgaaatgttattcagtttttaaaaagaaggaaatcttgtcatttagtacaacatggatgaacctagagaacacgatgttaagtgaaataagccaggcacagaaaggcaaataccacatgatctcacttatatgtggattctaaaaaaggtgaactcacaaaagtagagaaatggtggttatgaggccaggcgacaaggagtggagttgggagatactggtcaaaggatacaaaatttaagttagatgagagaaataagttctagagatctattgtacagcatagtgactttagttaataacaatggattgtatttcaaaaatcactatgagagtacattttaagtattctcattacaaaaaataatgataagtctgtgaggtgattcatatatcaagctcaatttagccatttgacaatgtatacatatttcaaaacatcatgttgtacacaataaacatctacaattttgtccaggtgtggtggctcatgcctataatcctaatgctttgagaagtcaaggtaggaggaggatcacttgaggccaacagctcaagaccagcctgggaaaaacagtaagatcccatctctaccaaaaaaaaaaaattttaattagctggacatggtggcacagctgtagtcctggctactcaggaggctgaggtgggaggactgcttgatcccagtgagctctgatcacaccactgcactccagccggacaaaagatagagactctatctctggaaaaacaaaaacaaaaaacaaaacagaaagatgaaccctgcctaccatgcatcatgttttatatttgtttcaagtgcaacctcttcctagaatataccattattttaactaaaacctgaaaacctagattacataaaatattaaaactgtattatcaatgggtttatcagcaatatctcattcctacctctttctcacgtattcgagagagaaaatgatcatcatggaaactgctggattttctcaggctgaatttcggtgtcatctgctaaatgaacaggagttatttaacatgttttcagatctggtttatccttaaccccaaagaaaacttctaaattgcctgaggcccgtaccaaaatagtactaacactgcaggaaaaaatcacttccaagtgataaaattcaaaaactattatgtttcctaatgtagatccgcattattttctataaataacttagtgattattttattttaaaatacctgcccctagaaaaagtccaatggatttctcacataccagagaaactgggataggcttctgtctcaggtatcgaggattttctatctgaaaatttaaaaataaaacaaaataaggatttattaattttggagttttaattattatttgataaaatatagaattaagctgccatatgaaacattttctagattcttaatatttaattcatttttagaatgggtattgtatgatatatttttagcggctccctacaagtaaaatataaaacataaactcccttgcatgccaaaatgaaccttcatgatcctctcactgcctaactgcccactctcatcttccattacccttcacttcacattttatgctcccaggatccacaatgatttatattaccagaacatggcagatgttctcatgcctgtccacctctgaatttctctgcccagccctccaaaccctgtaagcacacacctatttgttcttacagtcgcaatttaatcactgcactcccagatgtatttggtacatgaattcttaaacatacctttctaatagcaaagagaacacaaaattcctttgggactccccctaaatctccctttcagattcatctatcttcaccataccccacattccaaggacaccagacaatttgttttaacttaaaagcactatactgtctcccatgtctgagtctttgcaacctgtaagatcattcccccaacttctacacatggttaacttactcaagacttgtagtttaaaaatcatctcccccaggaaacctagttcctactactccagtagtaccctggatgctagttcccttttacaatctggcatctccctgtttcaaaacagtgtggactctgaaagcagagaccatgactgccctgttcaccactctatccctagcacccaactcagtgcccaattaatatttcttcagaaagaaggaagaaacaagaggaaagaaaggagtaacctgtacctgattccaccttcttatcagctcctaaagtatcctatgtccactctctcatagcccttatgtaatactttgagtgtttatcagtatgtctccacatctgtctttgaacagaaggagtactgggatgacatcttctcagttttgtatctctgggacctagcacaatatctaatgtatagtagcctttcaataaagtatttattgcatgaatatactatatgataaagtagacatattgatagttatctctactatttcactcacaaataaagtgataattaaaaatctctaccgtgaaagtctaatttcttcatatcacaaacccacaaattactacatggataatctcacaaagtacaagaacacaaactatcacttcaacctagggtagtggttcttacacttgttaaattaagattcatctaaagctgcctcctcacatatttttaattcagcctaaaggtttctccattcatggtgaactgtaacctaactggatgtgtaaacagactacagcttactcttgtgccactcactgagttttggcaattaaaggcaatcaatcgttcaaaccagattcaaataaggcaaacgcagagctgtaaccaatcctgctgtttctgtacctcgcttccattttgtgtacatcactatccttcttctgtccataaatcttcaatcatccagtagtgctgcagcctctctgaacctattatgattcaggggctgcctgatccatgaatcattctttgcctactaaactctgttcaatttaatttctttaaggtttttcttttaacatcctggagtgtactatgaggatcaagtgataaacatttcaaatataaattattggattctagttctccaaaatcccattgtgttttcaaaaagttccccaaacgatttattacggttaataactcttgaaaatgaacaatccatacccaatttgacaataaagataacggtgaatgaagaatcaattaatcaaaaaatgtagaagtcataacatttataatagaatccaatcaagtaaaacttaaaaggaatatagcaatagacaggatataaagtataattattttagcatctaggttaaaggaaatacacaaaacaattttctttcgtgtggacgccagatcctataaagtaatggcaactgtatgaatttaaatgtctctccccatcctccaaagacacatacagattgataaagagaccaaataaaaatgcccatcatccatgactacatcataaaaaggagaaagggaatacaaatccctggattaacatgtaggtggccaaataaagataccaaatcagcagaattagatcctgagccagagtggtagcatggggaaaaaaggaagtacctcagggtcctagtagtggtggaactaaatatcatcaaatactgacctgtcaaagaaaagtggcctaccttaagtgggccacacaaaaaaacttaatggctcagagtgccagagatgggcacaaaacaaggggcttggaaactatgaagaaccagaaaggcagttctaggaaggaatcacttctgaggtagagagaagcacctttgaaggaaggttgttcatgataaagggagataaaaaagcagctgaagataagggccctgcagaaacaagacagaatcaaagaatcaaaagaagacaagccatggccaggagctgtggctcttgcctgtaatcccagcattttgggaggccaaggcaggcagatcacctgcagtcaggagttcaagaccagcctggccaacatggtgaaaccccgtctctactaaaaatacaaaaattggctgggcttagtggcaggtgactataatcccagctattcaggaggctgaggcaggagaacctcttgaacccaagaggtggaggttgcagtgagctgagatcatgccactgcactccagcctgggtgacaagaatgaaactctgtctcaaaaaaaaaaaaaaaaaaaagaataaagaagacaagccaggctgacaaccacaaaaggcaccatttgttaaagaagttaaacttcagtgtagcagaggaggagggctgtccagaactaagaaataaagtaagccacccactaccacttcccacacaatcactggctattacttgttcagaaaaatctaacagataatcatgaacagaaaaaaagaatccaatatccacaaaaacttactatataaaatagaagaccaaaatcaaaacctgccagcagaaggaaacacttttttaaaaagctaaaatacaggaaaacagtaatacaggcttccttttgattcccatatctccccactctcatacaccagggtttttgtgcaacccacttaaaataggacgctctcctacatgtcaatacttaataatatttttgttccaccaccactaggacaacaggtattcaaatataacttttaaataacttcaggcataaaaatactacaaatcaaaataaagacaaaaatacaaagatgttaaataggaggtgactagattcaggaaaaaaaaacatggaagagtaacaaaaatcatccaagaaatgaagactaaattaagagttgtacaagagagaggctggacatggtggctcatgcctgtaaccgaggtgggcggatcacaaggtcaggagatcgagaccatcctggctaacacagtgaaaccccatctctactaaaaatacaaaaaaattagatgggcgtggtggtggcagcctgtagtcccagctactcgggaggctgaggcaggagaatggcatgaaccctggaggcggagcttgcagtgagccaagatcacgccactgcactccagcctggacaacagagtgagattcccgtctcaaaaaacagaaaaaaaaaaaaaaaaagagttgtccaagagagaaaagataactatagtaacagcaagagataaagataggacctgaagccaaaaaccaggaaataaaactgacataaaaacgtgtttaaaaaggatccaagagaaatggataaagaaaatgagaaacaagaatacaataaatgtataattggattccctgaaaaaaataaaataaatgcaactaaatattttaaattattaagaaaatattcttaaataaaataatacctgaatcatattaaatactctcactctttaccttggaaaactgacctaagaccatcgactgaaacataaacagatggccctccatattcatggcttctacatctacatattcaaccaaccaaactgaaaatattcaaagtaataattagaaaacaagaaaacagtacagtataacaactatttccatatcatttatattgtattaggtactataagtaatatagagattatttaatgattcataggttatgtacaaatactgcactactttatctaaggaacatcagcatttgctgattttggtatctgtgggaaggaaggaggatgttctggaatgaatcaactcttgatactgagagatgactgtacaatatattgaataaaatccgatgtgatatgccgaatatctttcagagtataatataaaagtccaaatattaaactttacgaatattttttaaaaattctctggaccctcagtcaaaaagattagacatttataactttatttatttatatatttatgaaaaatgaaaagtatgtatcacacttctcaactgtaacatacatcatataaaacattgtatttaaggaactcaggtaaagaaaatgcaaatcaaatattttacatacaatctagatttcctccaagaatcaagaccataagaaaccatttgaaacatgcaagaattcagaaaatactgtatcacaaggtccattcagtagactctattagagcatgaacattttatcttagttaaaagataatcaagagggaaaaaaaagataatcaaggaaccttcagtcaagagactgatgcttcctgattaagtattataacatctgcaatttactttcaaatagttccaataaggcaaaatcacaaaatttaaaaggcagcagcaataagttactgttgtactattctttttctacttgaatattttcatcataaaaattgtaaaaaaaaaaactggtttctttaacaagatagcataaacctaattgataattatcttatattttgattttgggaaaccaaatactattgattagtccagttaaatggcagtttctgattactgtatagtttaaatacatgctggaaaaaaatgctttttaaataatgttaattctgagaaaaaaaaacaatcatgctgagtttttgtggaaagacactgcaaaaaacttagtggttatttcggactagctaaatgaaatcaccatggaatttaaaataatacaagctattagatagaagctataaatgtattttagaaagaagagatggctattttttaagaaaaatgtgaaaattattttgtgtagattaaaaaacatcaagctgagaaaagtttcaccatctcaacagttatttttccaccttatatagataaaagcatggtagttttgagaagacaaaaaatctgagagtacataagtaactagaaaacaatatcagagatccttcaaagaaataatttcttgtgtcacacctggggttatgtcatattctttcaacaattatttactaaacatctaccatgtgccaggtactttgagagacgtttatgacaagctgtgagaaaaagaactgtaaacacctgaaaataacacctgatggaaactctacataaagtaataaataggccataaatggtaaatggttgcataaatagataaggcttttaattttatattttcaatccattcaatcaatatataactatttaaaggaaaatgaacaaaaacataatataatgaaaataatatattgtggagtttataacattaatagattaaaggaagaaactatataatcctctcaaaagataaagaaaaattcaggccaggcatggtggctcacgcctgtaatcccagaactttgggaggccgaggtgggcagatcacaaggtcaggagatcaagaccatcctggctaacatggtgaaaccccgtctctaccaaaaatacaaaaaaattagtcgggtgtggtggcgggcacctgtagtcctagctactcgggaggctgaggcaggagaatggcatgaacctgggaggcagagcttgcactgagccgagataacccactgcactccagcctgggtaacagagcgagactccatctcaaaaaaaaaaaaaaaagaattaaaaaattccacaaccattcatgatttttaaaaatatcctgacaaaatagagacatttttaatttgataaatggaatctaccaaaaaaactataagtaagaaaaaactacaagtatgaaaaactagccaggtgtggtggctcacgcctgtaatcccagcactttgggaggctgagctgggcagatcacctgaggtcagcagttcgagaccagactggctaacatggtgaaaccctgtttctcctaaaaatacaaaaaattagccaggcatggtggcgtacgcctgtaatcccagctactcggaaggctgaggcaggagaactgcttgaacccaggaggtgaaggttgcagtgggccgagatagtgccattgcactgagtgaataagagcgaaattccatctcaaaaaaaaaaaacaaaccatgaaaaactgaaagcattccctttaagattgggaatgatacaatgagtaccacccactatgaacatgctcctattcaacactgtagtggaatcctaaacagcatttttttaaaaaagataagaaaaggaaaaaggaggaggatagaaagaaagaagagggtacaagattagaaagtaaaaactagaacacctcatcatttgcagatacctacttacatagaactctataaatgaataaataaacaagtaaataatagaactaataagagtttggcaaagttgccagatgccaaaccaacatataaaagtcaactgcgatcaaagaggcagagcaaaatgttcaaatagaagcctttagcaattttccccgcagcatgaacatcaaattgaacaactattcacataaaaaagcaccttcataagaagaaaaaatcaggtgagtgatcacagtacctggttttagcatattaaggaatgagatgccaaagaaggtaggaaagacagtcttaaatcacctgcatcacccttctcctatcccccagcagtggctacatggcatgaagagagaatctgtgtatttggggaaggaagagcacagtgattgtgggattttgcattgaaactcagtgctgccctgtcacagcagaaagaaacagcaggcagaattcagcttgcacccacagaggaacatttagaccaaccctagccagaggcaaatcattcatcccagcagtcggaaccttagttctagcgaactccaccaccaccatgggctaaagtgcactggagtcctaaataaacttgaaaggcagtctaggtcacaaggactgcaagtcctaggcaatctctgatgctgtgctgagctcaaagccagtgggcttgggggtgcatgtgacatagtgagacaccagccagggtagccaagagagtgctggtgtcactcccaggcaacacagtttgcagctctgagagagactccttcactctgcctgaagagaggagagggatgagtaaaaagaattttgtcttgcaacttggataccagctcagccacagtagactatggcaccaggcagagtcccaaggcccccagtccagggcctagctcccaaacatttctaaacacacactgggtcagaggggaaccgactaccttgaaagaaaggacccactcctggcagaattcatcatctgctgactaaagagcccttggtctctgaatgctcagcagtgacagctaggcagtacttgcgtgggcctggggtaagacttagtgtcatgctagcttcaagaatgatcccgcacattcccagatgtggtgtctaggggaagaaatcccctcagcttgaggaagggagagggaagacaaaagggaacattgtctttcacctttggataccaatttggccatagtagggaagagcaccaagcaggctcctggggtcaccaattccaggccttgggtcctggtaggcatttctggcagcagacttctcagtggaaatgtaacaggccaaaagagaggggcatgacatatttaaagtgctgaggaagaaatgcttttatcctggaatagtatacccagcaaaaataaccttgagggatttgatcaacaccagacctatcctacaagaaatgctaaaggaatttctttgatccgaaaggaaaggacattaatgtgcaataatgaatcatctaaaggtataaaggtcactggttatagtaagtattatacttagtaaagtaagtatattactattataacactgtaattgtggtgtataaactactcatatctgaagtagaaacactaaaagatgaaccactcaaaaataataactgtaacaatttttcaagacatagtgtaataagatagaaacaacaaaaagttaaaaagtggggggatgaagctgaagtgtagagtttttattagttttctctttgcttgtttatgcaatcagtgttaaatgatcagcagtttaatataatgcgttaaattacatgcacatttcatgctaacctcaaaccaaaaaacctacaacaaatgcacaaaaaataaaaaccaagaaattaaaacataccacgtgagtaaatggctttcactaaaaggaagacaggaaggaaggaaaaaggaagagaagaccacaaaacaaccggaaaacaactaataaaatggcaggagtaagtccttacttatcaataataacattcaatttaaatgaactaaactctccaatcaaaagacatacagtagcttaatgaaaacacacctgggccaggcacagtggctcatgcctgtaatcccagcactttgggaggccacggtgggcagattgcttgagctcagcagttcaagaccagcttgggtaacattgtaaaaccccgtcttcacaaaaattccaaaaattagctgggcattgtagcgtgcacctgtagtctcagctacttgggaggctgaggtgggaggatggtttgaatccaggagtcagaggttgcagtagccaagatcatgccactgcactccagcctgggtaacagagccagaccccatctcaaaaaaatgagcctaataactatttacagaacatttcatccaaaggatgtaaacattcttctcatccacatatggattatccacaaggacagactgtatgttaggccacaaaataagtctttaaaaacttttttgaatttaaattgcatcaagttttattacctctgaccacgaggtaataaaactagaaatcaataacaggaagaattttgaaaactatacaaacacatggaaattaaatatgctcctgaatgacccatgggtcaataaagaaataaagaaggaaataaagaaggaaaattttcttgaaacaaataaaaatgaaaatacaacataccaaaatctatgggatacagtaaaagcagtagtaagaggaaagtttatagcaagaattatcaatatgaaaaaggtagaaaaacttcaaataaacaacctaatgatacatcttaaagaattagaaaagctagagcaaaccaaccccaaaattagtagaacagaaataataaagatcagagcagaaataaatgaaatgaaaatttaaaaaacacacaaaaaatcaacaaaacaaaaagtttcttcaagagatcaaatcaacaagccttcaaccagatgaagtaggaaaaaaagagagaagattcaaataaataaaatcagagatgaaaaagagacattacaactgatatggcagaaatcaaaaaatcattagacgctactatgagcaactatatgctaataaatttgaaaactgaaaagaaatgtataaattcctagacacatacaacctaccaagagtgaataaggaagaaatctaaaacctgaccagaacaaaaacaagtaatgagattgaagctgtaataaaaacatctcccaacaaagaaaagcctaggacccaatggcttcactgctgaattttatcgaaaatttaaaaaagaactaatatcaatcctactcaaactattccaaaaaacagaggaggaaggaatatttcctaactcattctcaaggctagtattaccctgataccaaaaccagacaaagacacaccaaaaaaagaaaactacaggccaatatgactgatgaacattgatgcaaaaatcttcaacaaaatactagtatactgaattcaacaacacataaaaaaaaatcattcatcatgaccaagtaggatttatccccaggatgtaaggatggttcaatataggcaaatcaatccatgtgataaatcataacaacacaatgaagggcaaaaactgtatgaacatttcaattgatgctgaaaaagcatttaataaaattcagcgtcccttcatgataaaaaccttgaaaattctgggaaagaagaaacatacttcagtacaacaaaagtcatatacaacagacccacagctcatatctatattgaacaggaaaaactgaaagcctttcctataagatctggaatatgacaagatgcccactttcattactgttattcaacatagtaccgaaagtcctagctagagcaatcagacaagaggaagaaatacagggcatgcaaattggaaaggaagaagtcaaattatgcttgtctgcagattatataatcttatatcttaaaaaaacttaaagactacaacaaaaaactataagaactgacaaacaaattcagtaaagttgcagaacacaagatcaacatacaaaaattaatagcatttctatatgccaactgcaaacaacctgaaaaagaaatcaacaaattaattccatttacaatagatacaaataaaataaaacacctagaaattaacttaaataaaagagtgaaagatcagtacaacaaaaactataaaacactaatgcaagaatttgaagaagacacaaaaaaatgaaaagatattccatgtgcatggattggaagaatcaaaattgttaaaatgtccatactacccaaagcaatctacagagtcaatgcaattactgtaaaaataccaacaacattcttcacaaaaatagaaaaaaataatactaacatttatatggaaccaaaaaaagactgagaatagccaaagctatcctgagcaaaaagaataaaactggagtaatcacatcacctgacttcaaactatagtacaaagctacagtaaccaaaacagcatggtagtggcataaaaacagacacacacaccaatggagtaggatagagaacccagaagtcaatccatatatttacagtgaacttatttttgacaaagatcacaagaatacatatgctggggaaaggatactctcctcaataaatgatgctgggaaagctggatatccacatgcaaaacaatgaaattagagccctatcccttgtcatacataaaaatcaaataaaaatgtaggaaaaacttaaatctaagacctcaaactaggaaactactaaaagaaaacactggggaaactctccaggacattggagtgggcaaagatttcttcagcaattaccccacaagcacaggcaaccaaagcaaaaataaacaaatgggatcttgtcatgtcaaaaagcttctgcacaaccaaggaaacaatcacaaaaaatgaagagacaacccacagaatgggagaaaatatttgcaaaggagctcaaacaactctataggaaaaaaaccaataatccgacttgaaaatgggcaaaagatctgaatagacatgtcttaaaagaagacatataaatgtcaaacagacatatgacaagatgtttaacattactgatcatcagataaatgcaagtcaaaactacaatgagatatcatctcaccccagttaaaatggcttctatccaaaagacaggcaataataaatgctaacaaggatgtggagaaaatgaaacctttgtacagtgttaataggaatgcaaattagtacagccactatggaaaacagggtagagattcctcaaaaaattaaaaatagaattaacatatgatccagcaatcccactgctaggtatatacccaaaagaaaggaaattagtgtatcaaagagatatctgcatgcccatctttgttgtagcactgttcacaatagtgaagatctggaagcacgctaagtatccatcaacagatgaatggaaaaagaaaatgtgttacttacacgtaatgcagtactattcagccataaaaaagaatgagatcctgtcatttgcaaaaacctggatggaactggagatcattaagttctgcaaaataagccaggaacagaaagacaaacttgacatgttctcaattatttgtgggagttaaaaattaaaacagttgaactctgcagatcgacagtaggatgatggttcacagaggttgggaaggatagagggggttggggaaagtggggatggttaatgggtacaaaaatatcgttagagagaatgaataagacctagtatttgatagcacaatagggtgatacagtcaagaataatttattgaacatttttaaataactataagagtgtaattggattgtttgtaacacaaatgaaggatcgatgtttgagatgacagatacccatttatcctgatgtcattattatgtatcatatgcctgttatcaaaatatctcatttacctcataaatatacatacctactatgctcccatacaaatttaaattttttttacatttaacatgtaccctaaaacttaaagtataataataaaaaaaaaatcaactgcatttctgaaatgagtaaaaatcatctaggagaagagtttacaaagatataatttctaatatactgcataattcctagataaactgacaaaatgataccctagacctttatagagcaaataagcttcatcaaaagattagggctaaagactgaaaaaaaaatagagagtagaatccattttggacagtctcgatgttgcaaaaaatgtcaattcttaagttgatctagcaattaaatgtgatccaaaccagaatttcaacagggtttttgtaaaacttataatgaccttacaaaatgtatataaacaaaaacagggcaaaagtagtcaagacatgcctgatgaaaaaaatcaaggtggggcaattggcaatttataaagatataataaaaccatccgggcatgttggctcacgcctgtaatcccagcactttgggaggctgaggcgagcagatcatgaggtcaggagatcgtgaccatcctggctaacacggtaaaaccccatctctactaaaaatacaaaaaatttgcctggtgtggtggcagacacctgtagtcccatctactcaggaggctgaggcaggagaatggtgtgaacccaggaggcggagcttgcagtgagccaagattgtgccactgcactccagcctgggtgacgagcaagactccgtctcaaaacaaaacaaaaaaacaaaaagttagccaggcgtggttgtacacatctgtactcccagctactcgggaggctaaggcaggagaatcacttgaacctgggaggcggaggatgcagtgagcagagattgcgccactgcattccagcctggcaatgaaatgagactctagctcaaaaaagaaaaaaaaaagaaaaaaaaagaaaagaaaagatacaataaaactatagtaatgtagacaaaccaattgaaccaactggaaattggcagaaagaaactcaagtatacttatttgataatgtgatttgtgaaaggtctagcattgccaatttttgagaaaagaagggaatgttcaataaatagaagaatataaaatcagatcacttcctcacaccatatataataaattcccaatggattcgatcttatattaaaagcagaactacaaaaactttcagaagacaatttagaagaatgatgttatggcctcaatctagaaaagatttgccaaacaagaaatgaaaaaaaaaaaagcataaatacaaaaaatcaactcaagatggattaaagacttaaatgtaaaacccaaaactataaaaaccctggaagagaacctaggcaatacatcctggacatagtcctagcaaagattttatgacaaagacaccaaaagcaattgcaacaaaagcaaaaattgacaagtgggatctagttaaacttaagagcttctgcacatctgcacagcaaaagaaactatcaagagagtaaacagacaacctacagaatgggagaaaatgtttgcatctgactagggtctaatatcccgcatcaataaggaacttaaacaaatttacaagataaaaacaagcccattaaaaagtgagcaaaggacatgaacagacacttctcaaaagaagacatacacgtggccaacaagcatacggaaaaaaaagctcaatatcactgatcattagagaaatgcaaatcagaaccacaatgagataaaatctcacaccagtcagaatggctactataaacaaaatcaaaaaataacagatgctggcaaggttgtggagaagagaacacttatacgctgttgataggaatgcaaattagttcaaccattgtggaaagcagtatggccattgctcaaacagctaaaagcagaattaccatttgacccagcaaccccattactgcatatatacccagaggaatataaatcattctacagtagagacacacgcgaatgttcattgcagtactattcacaatagcaaagacatcgaatcaacctaaatgcccaccaatgacggattggataaagaaaatactgtacatatacccacggaatactatgcagtgataaaaaaggatgagatcatttcttttgcaagaacatgaatggagctagaggctattacacttagcaaactattaaaaacacaggaacagaaaaccaaatattgtatgttctcacttataagtgagagctaaatgacaagaacataagaacactgagaaagaaacaacggacactggagtctacttgagaggggagggtgggaggagggagaagagagaaaagggaactattgggtactgggcataatacctgggtgatgacatgtgtttacctatgtagcaaaccttcacaggtacccccaaacctaaaataaatgttttaaaaaagcatcagtaagagagaaattaataaacttgaccattttaagaacttctccaaaaaatacatcatcaagaaaatgataaaaacaagtcataaactgagagatgtttgcacaaatgattagtctccaaaatgtgtaaacaaggcctttaaaaatcaatgaaaaggccgggtgcggtggctcacacctgtaatcccagcactttgggaggctgaggcgggcagatcacctgaggtcaggagcttgagaccagcctggccaacatggtaaaaccccatctctaccgaaaatacaaaaattagccaggcatggtggcaggcacctgtagtcccagctactcgggaggctgaggcaggagaatcacttgaactcgggaggcggaggttgcagtgagccaagatggggccatcgcactccagcctgggggatgagagtgagactttgtctcaaaaaaataaaaaaattaaaaaaacaatgaaaaaaagatgtcaatacacttgagaaaattgaggaaaaaaacttggggcacatttcactgatgaggaattatgaatggctcataaacatataaaatatggtcaatatacttagaaatataaaaaatataaagtaatatcacaatgcggtgatattttacaattttatagattggcataaattaaaaatttacaataaaaatgttcaagatgtgaaacactactagtgggtacatgaattggtacttttactcagggaaacaattattaagataataatacaatctacctcaacatggtaccagagaaatgcgcatattcttcagtaaataacacagtgccagccaggcatggtggctcacgcctgtaatctcagcactttgggaggccgaggcaggtggatcactcgaggtcaggcgttcgagaccagcaaggccaacatggcaaaaccctgtctctactaaaaatataaaaaaatcagcagagcatggtggtgcacacctgtaatcctagctacttcagaggctgaggcaggagaatcgcttgaacccgagaagcggaggtttcagtgagccaagatcatgtcattgcactccagcctgggtgccagagtgaaaccctgtctcataatcccagctactcaggaggctgaggcaggagaatcacttgaacctgggaggtagacgttgcagtgagctgagatcacaccattgcactccagcctgggtaacaagagcgaaactccgtctcaaaaaaaagtaaataaataaaataaaataaaaataagtagcccagtgccatatacacactgcaacttgaaaaatagaggcagcaaatgtccagcaggcagcaaagtacatgcaattaaatatgtaccagctgaaggtataaatatgcatcgtcatatatacatatacatatgtatacatgtatgtgtatatatacatatattaggtaataatttatttttggaatgttgcagggttttgtataaagcagcataggaagtaagttcttcaaagatacatgcaattctgcaaatatacaaaacccaactcatgaagcagaatcaaaatataaaggaaaaaataaagaggaaacaggaatttccaaagatgctcaagcactaattaagtttaaaatttaaaaccaaaagccaagaaaaccatctgtgatttatttttattcagctctacatttacaagcagggtacaaaatattggttcagctaattacaatgcagcatttcaactatgcagaagtaactcctatttcaacctcttcatctttaaaagccattaaataaagaagttaaagactcattctagcatcataaatttcctttctcaagttgacaaataaatagaaaatgtctattctaattttttaaagcaacaatgaacactgtaaacaacagtgaattatgttgttattcatttacaatacactgagtttgtctcataaccaattttaatatgcaatgggaattattcatggtaaagcatgttcttgagtctatttgggggaaataagcaatctattttctgattttgtaacagcagccagatgtgctttgaagttcaatgttcccactttgtaatccacaagtaacacggaacttgaagcaatctgtaaacagtcttaacattttttatgctcttttagaaaagttcttcttctctcatactacctcaaaaaaagaataccacaataaatgtccaaaatggaaaataaaaaagtcttaaatgaaacactgaagtcgaagaaaatattgtatagaaagcaaagctgaaaataattaagtttcaatggcacgaataaataacatgtttgcacatttcttgcttaacaggcaaatagaatcgcaataataaaatatgtaataacttaggctagacatgaaaacagacatctgaatactttttaatgaaaactggcttttgactttttattttgtttattttttttagcagatttctttgttgattgtcagggttttctgtccacttgttttttaaaattacttggcatttggtcaaactgacataagcaaagaacctcttataaactaatggttatcaaatagagaagttttacatttccagaaaaattaaaaggcactttatctgatatactatcttagcaagaaggacattgtcaagcaatatattaccagtaacacaactaaaataaatgtttttaaatcatagcatcagtcagaagtgccaaaactctctccatagaacaaaataaattcactcttcaacaccaaattgaatatgctccaaaattatgcttttaagtaaatattttagaactttaaaaccatttttccacagaaaatttacaatactatattccaaaaggactctcatgcagaatagagaaaaagctcttatataggaataggaaaagggcagacaacaggaaaactgacaaagctttcagtaaacactttgagaggctatccaaattgacaataaacatattaaaatgcacctaactgtattagtcatcaggaaaacatatattaaaaccacacaatactatgtcactaactactctcaagaatggctttttttaattaaaaaaaaaaattgcctggccaggcgcagtggctcatgcctgtcatcccaacactttaggaggccgaggcagatggatcacctgaggtcaggagtttgagaccagcctggccaacatggtgaaaccctgtctctactaaaaatataaaaattagccaggcatggtggcggacacctgtaatcctagctactcaggaggctgaagcaggagaatcacttaaacctgggaggcagaggttgcagtgagccaagatcatgccactgcactccagcctgggtgacagagactgtctcaaacaaacaaaaaaaaaaccctgacaatactaggtattggagaacaggcagagtaatgggctctagcacacagtgctgctgagaaggtagattggcacagccactttggaaaactggcaatatctatcatatcagttagctttttgctgcataacagatcatcccaaaacttcatggcttgaaactacaaccattttatttagcacccaattctgtgagtcagcaacttgggcagctcatctactgggacagtgcattcttgaaatcgacccaagagtcccatagacagttctttcggataaacatagaaatgtgctcttctggtcttaaagtttgaaacttgcatttgttttatctgagttccctcctcaggcatctcaataaaatatcaaagaactgaaactgaccagatcaccacatccagacaatgcaatgctggacccctcattcaccatgattgctcctttatttctccctagttcctgttttcttacacattgttacagttcttccctgctatgtaaacctctaattttagtcattcagagagattaatctgagattgatctcccatctccttggctgcagcacccaattaaagccttcttccttggcaataattgttgtctcagtgattggctttctgtgcagcaaacagcagggcctagactgaacccctggtgtttcagtaacaatctcagctggacttccttgtctgttggctatgccagtgtgatagctgccctcaataagccccgaaatgaaggttaaagcaggtctcaatcagccccaaaatgaaggccacactgagtacaatggccaggtttccacatttcttacaggaagaacagaggaagaaaattttgacccagcagagggttagaaaaaatttgacccagctacaagacaagggaagggtaagtaatgaaaaagtatttaccaacttttccttgaaatttgtaacgttccttacacactgatgcattttatataccagcagatacagtgcttacctataattgtgagagctctgtatctaccattatgatctcttttcaacaattaacatttttttttgtcctcttgtttctagatcacattgaagacaccataaagttttccgttttattgttctttgcaaagatccagcttctgtttcattgattagttctaatgctttgggggaaattttgattgtttcttgtaggtttttgtttatattttggctttgtttttttaattgattaaattaaataagggatctttgatcctcaatatcactttgggcacatcacagaatgttttgtcaaattttaccatgatttattttagtctgcacttggtttttattactgtttttacacaaagctattcaggagtgtgtttgtacttcattttaagctttcagatgaaaacacggaaagggaactatctttttgatgttactgtctagctttattcaaatgaactcatttaattagaatttctttatgcctcagttaaatcagttttataactatcccatgactatgtgaaaagtctataaatccatatcccattcttttagttggtctttgttctggaaccatactttttattcacttttagaaactgccataccattttaaaaattatatatgaagcatggtaatttctccaatctccttttttttttttttttttttctgagacggagtctcgctctgttgccaggctgggaaacagtggtgcgatctcggctcactgcaacctccgcctcctgggttcaagcaattctcctgcctcagcctcctgagtaactggaactacaagcacatgtcaccatgcctagctaatttttgtatttttacaaaaatttttacaaaaatacaaaaattagtagagacggggtttcaccatgttggccaggatggtctggatctcttgacctcatgatccactcgcctcaatctcccaaagtgcttggattacaggtgtgagctaccgtacccaggctcaaaatttttttcagttctttcaaaaaggtaactctaggtgaatcatgatttttaaaaggaaacatactacatagaaaaacagaaattattagtcactctgataggcttcagctcttttacccatcgttagctatagctataaatggaatatatccttgcaggtcaggagcacaaataatttctttctttttccttaaaacaataaataaagcacaagaccaaaaaaaaaataaaatgttgctcatggctgactcctcatggaaaacagcagaatatattaactttttgaattttttaaatttaaattccctctatgcctctgtgagctttgacaaaagaatacagtggtataaccagcaaaataccaagaaaacagttctgttggtgaaacactccaggatattggtctctgcaaagattatttgagtaagacctcaaaagcacaagcagccaaagcaaaaatggacagatggggcgacatcaagctaaaaagcttctgcacagcaaaggaaacaatcaacaaagtgaagagacaacccacaaaatgggagatatttgcaaactaagtatctgacatgagattaatgaccaaaatacataaagagttcacacaacttaatagggggaaaatccctcatttttaaatgggtagaagatctcaatagacacttctcagaagaagacatacaaatggccagcaggtatatgaaaaaaatactcaaatcattaatcatcaaagaaatgcaaatcaaaaccataatgagataccatctcacatcagttaaaatggcttatatcaaaatgacaggcaataaaggatgctgacgaggatgtggagaaaggggagcccctagacactggtggtgggaatgtaaattagcacagccactatggagaacagtatggtggtttcttaaaaaattaaaaatagaactaccataagattcatcaatcccaatgctgggtctacatccaaaagaaaggaaatcagtatatggaagagatatctaatagtgctgtagtaaacatgggacagattactgcatttatactaaactcccatgattattgcagcactattcacagtagccaagatatggaatcaatcttattgcccatcaaaggataaatggataaagaaaacatggtatatatacacaattgaatattatttagctataagaatgaaatactgtcatttgcaacaacatgaatagaactggaagacattatgttaaatgaaataaggcaagcacagaaagacaaatatcacatgttctcactcatatgtgctaatgtgctagctataaaaaagaaaatgaactcatggaggtataaaatagaatgatggttaccagaggctgggaggggtagtggggagtgagggttaaatagggactggtaaataggtatgaaaatatagctagatagaaggaataaaatctagtgttcagtagcatggtagggtaactatagttaacaataacttactgtatattttaaaataactgaaaaatgggattgaaatattcctaacacaaagaaatggtaaatgtttgaggtaaatgatatctcaattactctgatttgattataacacatggtatgcttgtatcaaaatatcacatccccataaatatgaactaatatgtatccataattaaaaattttaaaataacaaaatagttccatcaaacaaaaaaaaatccctagtgcttattcacaatagcaaagacatggaatcaacccaaatgcccatcaatgatagactggataaagaaaatgtggtacatatacaccaaggaatactatgcagccataaaaagaaaaaagattatgtctttgcagggacatggatgaagctggaagccatgatcctcagcaaactaatgcaggaacagaaaaccaaccaccacacgttctcatttataagtgggagctgaacagtgagaacacatggacacagggaagggaacaacacacactggggcctgtcaggggaggctagagggttgtggggagagcattagaaaaaagagctaatgcacgctgggcttaagtgatgggttaataggtgcagcaaaccatcatggcacacgtatataacaaacttgcacatcctgcacatgtaccccagaacttaaaaaataataaaataaaaatctctagtgctatttatacccttgtagccaaattctagcccaacacctggaaactactaatctgttctccattcttatagttttaccatttccacaataccatataaatgcaatttaaaaaacagcctttttagtctggcttcttccattcaatataatatatttgaaattcatccactttattgtgtgatttgataattgagtccttttcattactaaaaagtattctattgtatagatgtacatataatttgtttatccagtctccagttgaggggcatttaggactatttgcagttttgaacaattaccagaaaagagggagagagagaactgttaaaaatacttgcatataaagtttttgtgtgaacacagactttcatcacacttgagtaaatacttaggagtgagattggtgggtcatgtgataaatgtgttttaattttttttaagtgccaactgttttccaagtaatattttgcagcaagaggtgagggttccagttgctcctcatcctcaccagcattttgtattgtcaggtctttgtttgttttcaccattataataggtgtgtagtggtatctcatcatagcatcttttgtcccatcttttaattaggttgttttcttattgttgaggtttcagaatctttatatattctggataaaggtatttgccagatatgtgaatatctccctaagatgaaactggcctcacaacacaaattggaaagtgttccctcttccggtggagatggtatagaattggtattatttctcccttaattgtttaattaaatttgtcagtgaaaccatgcaggcctgaaattttctttgttgggaggtttttgtttttgtttttgagatggagtctcactccatcgcccaggctggagtgcagtggcatgatctcagctcactgcaacctccacctcctgggttcaagcaattctcctgcttcggcctcccatgtagctaggactacaggcacatgccaccacacccagctaatttttgtatttttagtagagacgaggttttaccatgttggccaggctggtctcgaactcctggcctcaggtcatcagcccaccttggcctcccaaagtgctaggattataggtgtgagccactgcgcccagcctgttgggaggttttaaaatataaattatatttatttaatagctataggactatgcaggttatctatttcatcttaagtgaatttttggtagtttgtgttgctcaaggactttttccctttcatctacattgtcaaatgtatgcccatagagttgcttgcagtaatctcttattatactttgagtatctatagtgtctgtaatgatatcttctctttcattcttgatattagcaaatctattcttttcattctttgtcagtctggctaaaagttcattgattccattcatcacttaaaaatccagcttttggtttcactgattttcattattgcttgtgttcaatttcattgatttctactttaatctttattatttccttcatctgcttactttgggtttaacttgttctttcgccagtttctttagatgggggtttagattcataatttagaactttcttttctctcttggtgctttcaagattttctctttgttggccgggtgcagtggctcatgcctgtaatcccagcactttgggaggccgaggcgggcggatcgcctgaggttgggagttcgagaccagtctgaccaacatggagaaaccccgtctctactaaaaatacaaaaagttaggcgtggtggcacatgcctgtaatcccagctacttgggaggctgaggcaggagaatcgcttgaacctgggaggcagaagttgcggtaagctgagatcgtgccattgcactctagcctgggcaacatgagcgacacttcgtctcaaaaaaaaaaaaaagatttctctttgtttctcagcaattttagtactgtggctaagtgtgactctttgtatttaaacttgaagtgcattgagctttttggatgcgcaaattgatgtttctcatcaaactagaaattttgcagccaatcattcttcaaacgtattttctgctcctttgtctcctcttgttctggtacccgcattacacatatgttggtgcacttatggtattccacatttccgtgaggcaatgttcatttttctgcattcttttttcactctcttctttggcctgcataatctctatcaatctatcttcaagttcactgaatcttctgccagttcaaatctattgctgagcccctatggtgaatttttcacttcggttatacggtttaacactataatttccatctgttttttttttttgctttttgtttttagagatgggggtctcactatgttgcccaggctggagtacagtggctatgcctcctgaggagctggaactataggtgcatgccactgtgcccagctctggttctttttcataatttaaatctctttatgatattctgtatttgatgtgatatggtcatcacagctttctgttttttgctcttgtttttgtttttttcagacagagtctcgctctgtcgcccaggctggagtgcaatggtgcgatctcggctctctgcaacctccacttcccaggttcaagtgatcctcctgccgcagcttcccaagtagctgggactacaggtgtgcaccaccatgcccaaataattttttgtatttttagtagagatggggtttcactatgttagccaggatggtcttgatctcttgacctcgtgatccgcccacctcagcctcccaaagtgctgggattataggcatgagccactgcgcctggcccatcacagctttctttacttctttaaacatcgtttcctttagttctttgaacacatttataatggctattttgaagtctttgtttgttaaatctggtctcacaggccatttctgttgcataatttttctctgtataagggccatactttcctgtttctttgcatgtcttataattttttttcttgaaaattggacattttaggtaatacaatgtagcaactttggacactgattcccctctccatgagtaattttagttgttttcatttgtttatttgattagtggcttggctagactatttcataaagtatatttctcccacagggtgaagactttggaatcacccctcagtgtatgcagccttgggcatgcatacagtcacctgtgatgacagtggatttagcagggctcctctgttttttccccttatctttttgttgaactctatatctaatttgatatgacacccagctattatgtctactaattgctggctgtttgttctattattttcaacaacaccctgggtcataaattgctccataggctgatccaattaaattcaggcaggggtagatgctgaggtagtctctgaggattgttctgaccccaggaggactcttcttagctgtctctgtccctggttctctctggtgaatgtactagcctgtggtttagcttactgctgttaattagtaggaactaccagtctcctctttaaaaatctccattgttttctacagcatccttaggtttgaacttcccaacactgtttccattagtccatttctttgaggagagcttctgatctcactggtcttcagactgcctctccccctgtacaaaaatctatgagctactacactgggcactgtgcagagggagtagctttcttgttcccggcttgcatctcttggagtgaaatctctatcctatgaacaagtcgaggtaaggacaatgaaggccacagtattcttgacctactgtgtctggggtagagcttctgccctatcagtcttggctgagtggaggaaaagagccctttcccccaaccactaagctgcactcaccaggaatttagccacctccacttagacttcaaagggataagaaatgctggcagcatgcccctcccaatacaatactgtatcccttgattgggagctcaggggagagaaacttcatcttctttgccacacccactgggaatggaatttctgtgaagctgagctggagaaggaacaggggaaaagtgaaagcgagtcatggttgaagtgccaaaaactcttgctgttcttaccaagctgtagttgattttcttgaataaatgtcttcatttgctctatgcctttaggacaatttccagatttaattaccaattagcaattatgcttgttttgctagggagcacatctgtggagctcctcatgctaccattctagaaatagaaaccccctcttcttttctaaaataagtatttcatgctgtaaatttcccaatgaaacctacttgggctacatcccacacattttgatatgttgtgttgtcattttaaaatattttctcatttcccttgagattttttcttttacccctggattatttagaagtgtgttgtttaatttctaaatatttgtggatttcccaaataatttgttaccaatctctagtttaattctctatgatctgaaaaattattatcttaatcattataattatattgtaaggttctgaaaaatggcgatgcttgttcatttgtctcagtggacagtcaactgcattcagatcagtctgcgaattccatctctcctacggacagtagctctggtgtcagtttcaagtttgaagtctttactatgtcatttgagtctgcctctcacatgtaccactcaaggggtggtctgggactagggcaatagtttacatgacagttcagttctctaagacttctatgaggctatgatttgggggctatgttccacacatgtccaccttggggaaagactggaacttgtatggttcatacacagactaccaatccccttctcccactctttccattcctggatttccctgcatactctctggctctgagagcttcttttccagtcccactggccaaactctgaaggaacctcattgcactattgtacagttccaggtgactaggcatactctcagaggaaagtataatagcaagcgaaaatacatgggaaaaaaaaagtatataaaatgttcctcccatattctttgcatgaagagaggtttcttttatctgttgatccagccaaacagatgggcgctaactgctgcccttataccacaatagcatagtttttccactggggctggtctagaggcagggccaagaaagaaaaaaaaaaatcccctcacattcttccattctcccacttctctggccaaaaagatgggctgctctgtaagtttctgccatccatgcctgctacacaatccctcaatttggcccaccctggagtcaaagctgggagttaaggaagaaaaaaaacacaaacagaaaaccaggaaacttcctgccactatatcagtgattcttcatattccaacttccctctcaatcggcctgttattattgacttttcagagtccccagttggtttgctttttgtattttgtccagaattcttggttgtgggagaacctggctgtaatagatttactcatggccagaagtttacattcacttttaaaagaaataaatgtcaacttctcaaataaaactctgaatatagttacactccccaaaagcaagctttggggaaaatgctataaatactgttacggctttgtttgttttttatgaataataaatatttactatttaaaaaaacacttaaaatgttaagaaaataagtgctgatattttaccatgtggaattatcagctaccattttgagtagatacttccagatatttttaaactctagagaaagacaaagagaatttgtcttatcaaagtattaattttttatgtaaaccactctcataactcttcttcatttgggtaactttgtcctagtctcaaaatctgacactttcactcatttgtggaaaactacagccaaatgagaagcctaaaatatcagaattttcagctcagtttctctcccagaccattgcgtagtatgaaatggacaggagtcaggcatggtggtgtgcaccaccagctactcaagaggctgaggcaagacgatcacttgaacccatgagttcaaggctgcagtgagcactatgatcatgccactgcactttagccttggtgacagagcaagaccctgtctctaaaaaaaagaaaaaataagaaaatgggcaggtttctaacctacatgaaaaaaaaagcatgaaattgcctaaaataaaactagataagacagctgaaattagatgcttacttaatgagaattgtcccaactaatcataccacaaagtaccccattaatgaacacatttcccttctctgtaaccttaagtaaaattacaataaagacccatgaagaagaggaaaagaaaagaaaaaaaagaagagaaaaagaagagaaaggagaaaaaggaaaaaataagaaaagagactacaaatctctgtgtaattagaattgcaaagaaaatattatcaattcaattaccacacaagagtaaggataacataattttcttaggataaaagttggtctttctatgtatggccatttttcttttaaaccatcagtcaataatgaccatgatttttagtgctaaatttaaaagcttcattcaatggaagatttcaattgtgtcagcaagctaatttttcccatccatttctatacctataaggtagataaagggatttaaattcaaagagagacaggatgcttaacttgtttcatgattgtgattttcattgaatgttaatattatatgcctcacttatcaaagaaaattcacaagcacattctagaaaccagaatgaacatacttatgactttttcctactaccttaaaactgtagcactttacaaaggaagctacaaataattcctagtcaacatcaaaaacttccaatattcctgacatagatcttaagatattacattaatcgcaaaataaatagaatctaaaacttgaaaaaccaaataagacataatttttaaagttttttttcaaatgggtacacatagagtgtttcacaatgatccacgagtcactaaagggagaatgttccaaagcctccatccatgcaagcactcaaatgaacttacaaatagcgaatacccacagcacaaacattcagcttgtgacttagagagtcagacacgaaataggtaaaaaatatattgagaaagcaagaaagcgtcataaaaactaaatgttgaaaagtttaaatattaagaaaaaatacaagagaaaaatatcattgctagtttttaataaataaatctctatttgaattatgtattcctagaaaaaatactaacatactcctgggaaaataaagaatacatttgggaatttgatttctgggaaaataaagaatatatttgggaaaaatttgattttttaacaaaagctagaaaattcaaattctacaacatctaaggcatcagaatgaaggtgttgacagtaacatcagtaatataaaaaatgtatccgtagtccagagcacaaaaattaactctggctactaatggatcactcagaggaagaaagaaaacaagccagtcacacattctcagacaaaactaaaatcaaagcaaaatctaagctttctaataaattgaatacttaaattattctatttaaagagatattgctcagcctgattaatgcctatatggtacaaatatataaaaatgcaagacttatattttacactgtaagtgtattctttgaacaataaaaatgtgaaacaaaaccctagacagacctacttttaaagtattacctcacaatatcttaaatgttttattttaattttattataccaaggaaagatttaattctcagaacagttaaacaaccgtgaaaagtactctatgtgctaagtaatgtatatcatgtttcaagtggctaagggcaaaggtgagtttaaaaggatagctccagaattttcttttccactttgatgttgctctctggcaaaaggaatttgtctttctgaaggatttcctgtgctcttctcccacactggtaacaggacttgcctccaatggcaacttcccctgcaccttaaaacatgaaaatgtttttcttttgatttattatcctcctctcatcaattctacttctctccttctctagaaaactcccaaaattaataggaggcccacattactttaatttcctatccatttcccaaccttctaactgtgcccattccatgaaccagacatcctcccttactctgctctccacccagacctcctgactctctgagctctccaaagattagagctgttctagtctccgggcgcagctgcctcctcaaacagtgtgactccaacatatacctccagctcttgactctcaggaagctctaggccttgaactatcccatttaaccttaccagttttcaaactccactatttaaattaaaacctttaaaatggatccgccctcatctgacagtcaattaactgacaaaaggccaacatttccgtttctcagaaccaagcctttaggtgcccttcagttcagcctttcaatcagtcacttagcacattttactctctcaaaagtttttcctttttacctttccctcctcccagcaatcatactaacatggagtccactataaagacctaaaacggccaggcgcggtggcccacacttgtaatcccagcactctgggaggccaaggtgggcagatcacctgagggtcgggagttcgagaccagcctgaccaacatggtgaaacccccgtctctactaaaaatacaaaaattagccaggcatggtggcacgcacctgtaatcccagctacttgggaggctgaggcaggaggattgcttgaacccaggaggcagaggttgcagtgagccacaatagcaccactgcactccagcctgtgcgacacagcaagattctgtctcaaaaaaaaaaaaaaaaaaaagacagaaagaaaaagtataagaaaaaaaaagacctaaaagataatcaagaccttgtctgcatttctactcatatccaatagaactttcataatcccaccaagtcaatttccctaaagcactgctttcattaaagaccattattagtaggaagtttttaagttttttgaaataacaatccctaatgtcagtgaataggtggaaaatggacaactgatatactgctggttgaagaaaatggacaactgatactgctggttgaaattggtatgaaccttctggaagacaatgtaccaaagatgtaatgtaagctaagaaagcaatcaaatatgtataaaaagattcttataaggaattttactgcaaaattacttgtgttaaacaaactgggagcaattcagatgtccaaaaatagcagaacacttaaaaagtttatggaatatccatccgaaagaaaaataaatgctaccattcacagtcatttatatagaattcttataaattcatataaaatgttaaattgcatataagatagcatttataataaattttgttgaatcttataaaaacacacagaaaaaagggaggaaaagatatgttatataacaaaatgttaacacaggtctctgttgatttttattcctctgattttctatatttttcaaattacaaattatttttataataaaacatattctaaaatcattctaagcactttttgttgtttcctcaaagcatttaaacagttagcatttatgtaaagtgaaatgagaaaaaaaaaatgcagggctcaatgttgcctaaaatttaaaagctaaacttctcaatttagcattcaaagctccaatgcaacgcagcctgacacagtgcccacagattccatacataaattccaaacacccaatcacgacagctcacttaccccactacatctttcttcgtgcctatttctgcctccaattcccacctctctacctctccaaatactttcatgaccctcagcctctataaactgttttccgtaagagctgctcatccatggggtccccttgagtgtttttaacccaaatggctgtgttgcttcaagttctcccttccctcccctccacctcgggcgactcacataactcatcttggtattctaccatatactatctttaattattatttattattatttaactattttatgtgcatatctcttatttcacacataacaaagttagcttgttggggacagggactattttatgtttgttcagaatgttatttatttcctatacttaagcccttctcaaggccacacagtaacatatgtctaacatccaacgttcactgaataaaatcaaattagttcagatattatacacatacaatatgattttgacacatctatatatacataaagcaaatacttttttttaccccaagattccaactattaaggcgagcttcaatgtcactatcatccaaagaaacaggagattttttcgaataaacttcctgaaatacaaaagggaaaaaggaagaggagaggaaggaaagatggaagaaataaaaggaaaagatggaagagataaaagaggaaaagatagaagagataaagggaaataaagaggaaggaagtaaaaaaggaaaaaaggaagaaaggaagggatgaaaagaagggaaagagggggaagggagggagaaaaagaagagaaagaagtgggacgggagggagaaaaaaagaacaaaatacatgtcattcagcgcaatgagagttttgtgtgcttgtctggtaatgctgtattgccctcagaggaaaggattaggttacaactgaactagggttctcagttctaagtaatgactgctgagggctatgagctgccttaacaatatattcacacagcaactaaatttcaaaaaaaaaaaaattaaaaattaatccaggctcttctctttaagttcttttacaaaaagttttaattgtggtataccacagtagctttaaagtgtattgtcgggggcaggggcgacgtgaaaagatgaattattctcataaaaattagttaacagggaagttttgtgatgatgtccaagaagctctttgttcttaaattaattctcactcacacactgaacataaagataaataatctttggactcacatcataaaaacacaattatggttgggcacagtggctcacacctgtaatcccagcactttgggaggccgaggcgggcagatcacgaggtcaggagatcaagaccatcctggctaacaggctgaaaccctgtctctactaaaaatacaaaaaaattagccgggcgtggtggtgggcacctgtaatcccagctactcgggacgctgaggcaggagaatggtgtgaacccgggaggtggagcttgcagtgagccaagatcacgccactgcactccagcctgggcgacagagcgagactccgtctcaaaaaaaaaaaaaaaaaacacacacaattatggtgattcttcactttttaaaacataacaattccatgcttttttccctcctgtataatttttgtattacacatttatcagccccagatgaaaactataatgaactagagacaacctaagatctgtacccagaaattgacaatgaccagaaaaccctaaaaactaagaaaggtaagtctgtggaaaagaatggctacctgacagcccagaaagtgtattttaaaattagatttgttgatacagcattctcatgcttttagaaggcttaattgctaacaaatgtacctatttatatctatggtcatttaaattactatgaagtaatttttttaaatgcactaaaatgttcttcatattttactgagtttctacatttcttttcaatacaatactgcattattatttataatactatattaaaattcattatcacttctactagtggtcctctgctttttgtatgtttttctcatgaacaagaatttcttaaataagacaatgtacctgccttgcttattctgagtaaatataatgattgtagtttatcactatttaaaatatgctgccctttatatttttttaattccaaattatcattcgataaaatgcaatgagttatgtatatagtgctatgtgctaaaacagtcatgtgttggccgggggcagtggctcacgcctgtcatcccagcactttgggaggctgaggcgggcggatcacgaggtcaggagatcaagaccatcctgactaacacagtgaaaccccgtctctactaaaaatacaaaaaattagccaggtgtggcggcaggcgcctgtagtcccagctactcgggaggctgaggcaggagaacggcgtgaacccgggaggcggagcttgcagtgagccgagatcatgcaggtgccactgcactccagcctgggcgacagagcaagactccatcacaaaaaaacaaaaacaaaaacagtcatgtgttacacatgctttctcttgtaactaaaagtcatgtaactcaagacagccagagttaggcaataaagactggaataagcaggcacagtgtttctcttttccaagctaactggggctgggtgcagtggctcatgcctgtaatcccaacactttgggaggctgtggcgggtggatcacttgaggtcaggagttcaataccagcctggtcaacatggtgaaaccctgtctctactaaagatacaaaaattagccaggcatggtggtgcatgcctgtagtctcagctacttgggaggctgaggcaggagaatggcttgaacccgggaggcggaggttgcagtgagccaagattgcacaccactgctctccagcctgggcaacagtgagactccatctcaaaaaaaaaaaaaaaaaaaaaaaaaaaaaaaaaaaagctaactggagtgctcattagcaccttgtccaaagcaaatctatgttgaacaaatagatgcaagacagacattcttatttcaaaatatacagtttaccttcattagaaaagcagtgttccctacttcactacaagttaattccagcttcttcttaattttatgatcactgggtatataatcatttccacataaattctgaacaaagggaaaatgttattctttgacacacaggagaaacaacagattgatgaatataacacctcagaatcattgaggaagtagaagggatactacactatataccaaacaccccaccttctttaacatcaggatgttcaccagaatcatccaactttattctgttttgaagcaatcattggtacttcaacaaatgaaattaaaactttgttcagctattttaaaacaacaagcaaaaaccaaacaaaagtaaaatctaatcttacacaaatctttggggtaatattttgtccatcttctctgtgagttggactcaaggagtgtgatctcactcggagcttcccagtgtactgttccctgctaagagaccaaaataatcgcaatcacaatttggagaattcagaggacacagagtattagaatctaggattaccatttctttcccttggaactgagatgatagtttgtattaacaatgatgttccatagccgggcgtggtggcgagtgcctgtaatcccagctacttgggaggctggggcaaggagaatcacttgaacctgggaggcagaggttgcagtgagctgagattgtgccactgcactccagcctgggagacagtgcgagactcatctcaaacaacaacaacaacaacaaaaaacacacaaaaaatgatgttccacatcaaaaaaaaaaaagaaaagaaatacaagtaataacctttttatttatatttcatttcatttaaattataagaagttacataaatgccacagacttgcttatgcaaatgctatttttaagtcagactgtaataaatcacctgtatttaaatcttttctcctcctttcccatttttcccaagtgtaaaaagagagaaaatgaagcatatattctacgggaagaacattgttttaaggtcagcaaacttggttggattcatgttccacatcaacatgaagccttaaaatatataaaataacaaaaccttcatgtagtttaaagtttcaattaatttgaaagcatgtcagaaaccacagatatatcaaaatcttctatttaaaaacacaccatgttaatttaggtaaaatgtgaaatgcagagtaagtaggaaatgagtttaaatggacttcatcaaaaagactcgtctctaatataaatatcatataaaatacattcttaaatggcctcctttagcctggagtctctcttatatgattttattcaaaccacttcaatgcaagtcccatgattatgaacacctattctctgaacaactgcttcaagatatattaaatggaaaataaccattatacaatgaattaaagtcactaacattcaaccacaaaccatattaggatttccttcacaaactgtgacctacacgaagtatttctaaaagacagaatgttaattcaaaagacaatattaaaacaaatgtattttgtaattaaaactcacagaataacattccttagactagttaataagtaatgtaaaatggctgaaaaagctgttttaaagagagctgttttttttaatacccctattcagtagtacaaacatccaaatagttaaaatcaaatgagaaaaatgggcaaagttaatattttgagtataattgtaccagtcaatgtgcatcagctgatacaagcatttaaaactctatgaggagaggtaacctgatatgtcatactaagcagtggcgtattcttaagaatagattaaataatcataaaaagatctatacttaaaaattgaaaaatgcttaaatattaaaattcttctcataaaaaaatactaatttaaaaatgagcctgaaatgtttatctatttattgcacagggttgcatacataaaacgacacaccctcttgtttcacttgtagctgtccttctgtaccaacctctttaccctcacgataaattttcaaaaatgttattgggtccatgctctaacttgtcatatatttttcaatcaactacagtatgacttgcattcatcccaaaagtcctataactaaggtcatcaacagtctcctagacactcaagaaaatgagtcataatctgtccttaatttagttgatctcactaaaacattagagatagtagtttaaagatgctgcattcaatggctccataaaaccattctctggccaggtgcagtagctcacaactgtaatcccagcactttgggaggccaaggtcagcctattgcttaaactcaggagtttgagaccagcctgggcaacatgcgacaaaaagcagtcagtcgggcatggtggtacatgcctgtggtcccagctacttgggaggctgaggtaggaggatcacttgagaccagcgggaggttgaggctacagtgagctgtgattgttccactgcactccagcctgggtgacagagtgagaccctgtctaaaaacaaacgaacaaacaaaaaccatttttccatggttctcatcctatcattcagagatctccttcacaataaccttcactagctttctttgcccatcccatacatgctgtgatcccagagttctgtgtctaatttattttcattttacatgctttctctggatgatccaatgtattagtttttcaaataataagttttgcttacaaaatctacatctatagtccaaattgctcccttggcctccaaacccattacaaaacaaaatgaatagccctacttccaattcaacatgtccattattattaactaaacttactatgttacccctaatacgtgctccaatgaagcccaagtaatggagaggcattgcagaagccagcttcttgtgaaggcatttgagccaactgaaggagaaggttggtatcattgttaaaatctggctggcacaagaaaaacaggacattaggtacagatgtttcattttctgccataagactgtctccagctggaaacaacttaaactctaagtaagtacaaaggctgaaattcagtgatggcactagtggtctgagtgaacagtgaaacagaaagtgggagaaaagttcaaccttaaaagcctttttatgaataacaagtgccacacgccacacagaatagcaagtcctggtgcttataagcacaacctacaattggtacaggggacctgatcacagtgagctcataatatggtacttgtgccaagcagaaaagcggtattgtgcctcaattaatttcaggatgccaaaaccaacatggaaagaaaaaattcagtacatttgtaacattccctgacatgccctttactactcttaagccataaaactaggagaatataaattttccctttcactttttcctaatgagaaaatatttcaacaggaattcacaaacactctcaaagtatcaatgctgattcttaatactagaaaaatataaacttatccctgtacagataaagaaataaggaatgatactatatatagatatagatatagatatagatatatagatataaagcctaaaggaagaccaatcaaatgtcctcctgtaaaagaaaattactttagggggtgacgtcagatgtcagcaagactctccttctctcaatggacacataaattcaacaacaatacatagaccaaaatttcctttgtgagacatccagagaccagatgagaggctcctgtactccaggcaagcatgaaaccaaccacactgaagccagtaggaaaatttgtggaatcctcttgcgccataagcaaggttacttaagggacttgttgctgtcttgcctgaatcttagctgtgacaggaaagggtcccaggttgggaactgctgagaacgaagcctccagtttggactagtatgcagtaactgaccatagcccctcccaccagctcagaactagcaggtggaaacccccagtcccaacttctccctggggaacgaaaaagctgaagcatctgtccaacattctggcttttggaaggggctgcctaagggaccggattctgcaagtactcacaggactggtattctctaaatgcctggggaccactgagaacaaaggtggtggtttggactagtaaacactcacggccagagctcctacccctggctcagcacaattagaaaaactcatggtccacagcttctccctggggagggaaagagaaaactaaagcatatatccaacattcagactcttgggggactgcccaaggaacttgtttctgtctcatctgtcttgaagcactggtgggacgcagcataaactaagtgcctaggggcagctgaaactaaaaaagcaagtaataaccaaaaaaggattgagccagtgtgctactagctccagaaggcccatggtacaagacacagaataagaaggaacaagagattatgatctcctaaaaacagaaaccagaaaatcccactatttagaaatttacacacagaagtccagagaagacatatccacagaaaaagtttatgaggaccccagaatctctactcaggccgattcttgaaggtctgcccctgtacaaagccaatccataaagactgggagaagcggctgtttttcaaatatgcagacattaacacaaagggtcaaggaaaatgaaaaatggcccaaagaaaggaacaaaataaatctccagaaaccaaccctaaagaaatgaaggtaaatggattagctggtaagaattaaaaacaaccataatcaaaatattcaataagcttaggataaattatgcataaacaaaatgagtattttaacaaacaaaatatttttaaaaagaaaaatttgagggctgaagaatacaataactgaactaaaaacttaactaaaggggctcaacagcagccttgatcaagtacaagaaagaatcagtaaactcaaagacaggacatttgaaattatacattccacaagagcaaaaatgtttttaaaagactgaagaaaacataagaaacttatgagacactatcaagcaggccaatttacatattactaaagttagagaaagagaagagagagaaaagcagtaagcttatttaaagaactaatctgaagagaaaaatggacatccagatttatgaagctcaaagaatcccaagtaggttgaatgtaaagagatctacaccaggacacattataatcaaattgccaaaagtcaaagacaaagaattttgaaatcaaaaagagaaaagcaactcactacatacaaaggagactcataaaactgtaaaaggatttttcaacagaaactttataggccaggagagaatgggatgatatatgcaaagtactgaaagagaaaaactgccagtcaaggatattattatataccatgcaaatctgtcctttaaaaatgaaagagagatacggtcccagataaacaaaagttgaaggagttcatcaccactacacttgacttaaaagaaattctaaagggagttcttcaagttgaaatgaaaggacactagttagtagcatgaaaacacatgaaaatatgaaactcactgataaaattatatataaaatacagattactctattgatataatagtggtgcataaatcattttcaacttcaacataaaaatgaaaagatgaaagtcttaaaaataactataacagttactgaaacaccaggagtccagtctaggtcccattgctcaccgcacagaaagtcaatcaatgagatcaatgagacaatgagtattgctagggaagaaggctttatttgggcactgcagccaagcagatgggagatcagtatcaaatccatctcctcgcccaactaaaattagtttatatagcaggaagaactgtaactacctgtgggaaaacaggaattagggactggtaaggaagaggagttcgtcaacaggaagcaggtggttggtcaggcaatcatgataggtgaggggtctggcataacattgtctagatgcagtgatctggtaagtttcagttccttgatactatctgggatacctgatggttggtttccagagacaggaactcaaataagacaaacgttaagtttctccagtgttaagactgggtgggttaatttctatgtttattcaaaaaaaccataaacatccattttatgggacaacttggatggtttcataccacaaaataatttgttaatgaatacagaatattaaaaggtgaaaatcgggacattaataacaaagtgtgtgagtaaaagtattgaattttttaatgcaatcgaagttatcagcttaaaataggttgttacaactataagatgatttatgtaagccttatggtaacacaaattctttaaatatagtaagtacacaaaacataaaaaaaaagaatcaaagcaaaccacagtaacaataaacacatcatcaaatcacaaagaaatataaggaagaaatgaacaaaggaattatataacagtcagaaagcaattaacaaaatgacttattaagtccacaaatgtgtgaaaattaaacaacaaattctcatcaatcaatgagtcaaataagaaagcaaaataaaggaaattagaaaacatcttgagacaaatgaaaacaaaaacacaacataccaaaatgtgtaggattcagtgaaagcagtgctaagaggaaaatttacaactgtaaaagcttatattaaaaaagaaaaaaaactctaacaacctagatgcacaccttaaggaactaaaaaaagaacaaactaaactcaaagccagcagaaggaagtaaatattaatagtaaggattagggcagggataaaacagaaaatagaaaaacaacagagaaaatgaaactaagagttgatttattgaaatgatcaacaaaattgaaaaacctttggctacacagaataagaaaaaaggagagaagactaaacaactaaaatcagaaatgaaagataagacattacactcaatttaacagaaataaaaagaatgactgggtgcagtggctcatgcctgtaatcccaacactttgggaggctgaggcaggaggactgctggagcccaggagtacatgaccagcctcagcaacatagtgagcctcatttctacaaaaaaataaaaataataaaaattagctggatgtggtggcacacacctgaggtcccagctacttgggaggatgaggtaggattgcttcagcccaagatgtcaaggcggcagtgagcagtgattgcaccactgtgctccagtccgggtgacagagtgagaatctatctcaagagaaaaaaaaaagttataaaaagaactgtaagaaagtactatgagcaacagtatgccaatgtattggataacccagatgagatgaccaaattactcgaaatgcaaaacttaccaagattgaatcatgaagaatagaaaatatgaacagaccaataactagtaaggaaactgaatcagtaattaaaaatctcccaaccaagaaaagcccagaaccagatgacttcactggtgaattctaccaaacatttgagaagtgatgccaatcctcctcaaacccattcaaaacactgaagagggaatactcccaaattcattttacaaagccagcattaccctgataccaaaaccagacaaagacactacaataaaggaaaattacaagccaatacctgaataacatagatgcaaaaatcctcaacaaaatactagcaaactgaattccatggcacattaaaagaatcatacaccataatcaagtgggatttatccctaagatgccaggatggtacaatatatgctaaataataaatgcgataccccacattaacagaatgaagaatagagattatatgatcatttggatcgatgcagaaagagcatgacgaaattcaatatttttttatgataaaaactcaataaattcagtacagaaggaatgtacatcagaataataaaatgcatatatgacaaagcccatacctagcataatactcgaacagtgaaaagctaaaaaaagcttttcctctaagatcaagaacaaggcaagaaggctcactgtcaccacctattaaatagtacagcagtcctagccagagtagtcaggcaagagaaaggcatccaaatcagaaagtaaaaaggaaaatggtttctatttgcagatgacataattgtatatgcagaaaaccctaaagactgcattaaataactatttaaactaataaatgaattcagtaaaatttcaggatacaaaaccaacatacaaaaatcagtagcacttctttacactaacaatgaattatccaaaaagaaatcaagagagcagtcccatttactgttatttttgctcttgttgccaaggctggggtgcaatggtgcaatcttggctcactgcaacctccacctcctgggttcaagcaattctcctgcctccccgagtggctgggattacaggcacacaccaccacgcctggctaattttttttttatttttatttttagtagagttggggttttgccatgttggtcaggctggtctcaaactcctgatctcaagtgatctgcccgcctcagcctcccaaagtgctgggattacaggtgtgagccaccgtgcccagccttaagttcattctttcaggctcttttcagtataatcttgatgagcattgtgagtactacttctttattgcttctccagtttctgtttgtttcctcttggaattcatattatctctgtattggggattttgaatctatattcttcatctcttacacttccatttgttatagccatctttttattttttcctttgttttctcagaaaattttttgagctggttttctaattcactgatttgattttctgtaatatttaatctgctgttttctgtaatatttaatctgctgttttctgtttccattgtgattttcagatttagtaatcatgtttttcaattgtaagcacatttttatgatcagactgttcatccccttttcacatatgaaatgtctacttgaatcatattgaaaaaaattaaataaacattttagaaatttctctttttaaaatagtttttttcttttattgtggtaaaaatacacaacatgagatctacttaagattttaagtgtacagcacagtattgcagctataatcacagtgttgtgcagcagacttctagaacgttttcatcttctgtagctgaaattttatatgcattgaacagcaactccccattttccccgtctgtaagcccctggcagctaccattctactctcctcttctatgggtttgactactatatagtatttatcctattgtgattggctatttaactcagcaaaagtcctccagcttcatctatcttgtcacatatgatagcatttccttttattaatgttgaaaaatattctattttatgtatataccatattttgttaatccattcatttgtagatgaacatataggttgtttccacatcctgactattgtgaataatgctgcagtgaacacaggagtacagacagctttttgagatcctgatttttctttagctttacacccagaagagggatttgctggatcataaggtaattctatttttgattttttgaggaacttccacactgttttccataatggctatatcaatttatgttcctaccaacagtggacaaagattcccttttctccaaatcctggacaacacttgatatcttttgtctttttgataatagtcattctaacaggtgtgagtgatagctcatgtggttttgatttgcattttgctgatgatgcgtgatgttgaacattttatatattgtatgtccactttggagaaacgtgtattcaagttctttgcccatcttaaaattgggttgttttggggcagttgagttgagtactttatatagattgaatattaacctattattacatatgtggcttgcaaatattttatctgattctgtagcttgtctcttcactctgttgattgtttgctgtgcaggagatttttaagttgataaaatcccatttgtctatctttgctttagttgcctatgttttggggttatatctaagaaattactgcctagaccaatgtcaagaagctttccccctacgttttcttctagtcgtttacagtttcagatcttatgtttaagtctttaacgcatttctagttgatttttgtgtatggtgcaagataagggccaaattttctttttatgcttgtggacttccggttttcctaacaccatttattgaagtgattatccattaaccattgtgtgttcttggcacctctgtcaaagatcagttgactgtaaatgcgtgggtttatttctgggctctttattttgttccattggtctatatgtctgtctttacgccagtatcatactgtttcaattactatagatttgtaatacattttgaaatcaggaagtatcatttctccggctttgttcttcttgctcaagattgctttggctatttggagtcttttgtgattccatgaattttcatattttttttattgttgtgaaaaaagccgttggagttttgatagggattgcattgaaattgtagattgctttgtgtatggacattttaacaatattaattcttccaatccatgagcacaggatatctttccatttatctgtgtcttcagtttctttcactgatgttttacagttttcagtgtatagatcttttccacctttggttaaatttattcctaggtattttatttgatttttgttgccaaatggattattttagctgtgtatgaaacagaagaaatcaagagaaatgaagcagagaagacaaggctcagatttcaagcagggtccagagatatattcatatgtccaacataggatatataagatggtaaaagcaaattatttttcattctcagcttcttccactagcaaaaggctctgaaggaagaaacaatccaagggcaaagatcaaatccaaggttttgccagtaaaatatggactcaggatcaaaatttcaaggacacatctttacacacttggttaagacctcagaaagatttgggcagtgcctgaaaaaagcaaaacaaaaaggcttctaaacgtttccatgttgtacctcttagaagctctctgacagataagagggattctaagaatcataagggtgttgtactacagtatcctgattcctggaccaaaacagagaaagtctgtctcaaagaaattcgtgaatacggtgtttgtctaatggaatggattacaattcgatacacagaaaggtgcaaaatttttaaaggaattatagcttcatttgaaagagttcaaaatgaaaatatgcatttggttccccaaattcatacaaacagaaagcaggctgaaaaaactattcagctgaaagcaaattatttcttgtggtaacagaaacatagctcagagggaagagccaagatcatgaaaaacagagcaaacagccatgaagaaccactcccaagaaacagcactaagacctatcatgaaacgggcaacaaatgcctggctagatttcagaactgctataaactatcattgcaatctgcctcctatttctctgctctttgaatgggaaagtttactgcagttctccggtccctctctcaccattgttggctgtgtaggtgagtgtgtgggaaagaataatgccttcctttagttcacaggttcaggctgaaagaagccacaccatggaagacagccacacctgtacctgatttttattgtttactgaggtatagcttgcatacagtaaaaccatatccttgtaaaatgcagagtttgatgagttttgacaaaagtacacacctgtgtaaccacaataaatatacatattattttcatcacacccaaaaattctttgagcctgagagttaagagtcaacttacctcttcctccaattccagacaagcagtattttcaagagtctcatatgtatgaaattaaacagtatgtacatgtttatgtctcgcttggcctggccaagaatatttctgagatttctccatgttgttgcacgtatcaaaagtttattattggccaggtgcagtggctcatacctgtaatcccagcactttgggaggccgaggcaggcagatcacctgaggtcaagagttcaggaccagcctggccatcatcatgaaaccccatctctactaaaaatacaaaatttagccgggtatggtgctgcacacttgcagtctcagctactccagaggctgaggcaggagaattgcttgaacccaggaggtggaggttgcagtgagctgaaatcgcaccactgcactccagtgtgagcaacagagcaaggctccacctcaaaaacaaaacaaaaaaaaggttcattattgctttgtagtattccattatatacataaaccataatttgcttttctattcatgtgtttatggacatttagattgtttacccctttgggttattatgaataaagctgctatgaacattcaagtatttatgtggacatatgttttcatttctctttaccaagtatctaggaatagaattgctgggtcatatggtaagttgtcttaaaatttataagaaatagccaaactgttttccagagtggttgtgcaatattatactcccatcaacagtgtatgagactttcagcttcatcacctcaccaccatacttggttttctcagtctttataattttagccatttataaattttagtctttataatcctaaggggtatgcagtggtatcacactgtgctttataatttgcatttccctgctaaagaatgctgttggccatcttttcatgtatgtatactagccatttacatattttctcttgtgaagtgtctgtaaactcttttgcacattaactggattgtgtgctcccttaagttgtaagaatcctttatgtattctagccacaagtcctttatcagatatatgtgatgaaaatttttctcccattctgtaccctgccaggtaattttccaaatggtgccttttttaaaaaaaggtttagatagttcagtttgtaaattttttcttcattgttttgtgtttttttatatcttattttagaaatctttgcctgttccaacgtcacagagattttctgttttcttctagaaactctatacttttagcattttcatttaggcctataactcatttcagtttttccccagtggatattcagttcttacagcataatttgataaaaagaccttctttccctcaattccactgccatctttgtggaaaatcaaatgaccatgtatatgagggctcacttctggaatttctattctattctataaatccatctatcctttcaccaatactactgtcttcattactacagcttgattttaagcctaaaaatcaggaaagtgaagtcccctaactttctcttcttttctataattgctttcattcctcatggataatgaatcaggctgaggaagttcccttctattcctaatttgctgagagtttttaacatggatgagtgttgcatcttgttatatgctttttctgtatctagtgagatgattacattatatttctaaaactatgatgaaatacataaattttcaaatgttaatctcaaattattcaaaatataatattatttccatatattaatagatctgatttgataattaagaattttaaaatctatgttaataagggaatgctgctaggtaggtttctgttcttgtaaggtctttgtcttcttttggaagcagagtaatactgacctaacaaaatgacttgggaagcattccctccttctctatttcatgtaggaaaaaaaactcagggaagattgataaaatttcttccataaaagccttaaagaattcaccagtgataccatctgggcttaagagatttgtgaggtggttaattatgaattcaatttctttggtatatatagagctattcagatttcccatttcttgagtcagtatttagtttttctgtctttcaagcagtgtgtctatttcatcaacaatgtcactggtataaagtggtttataacattctcttatcttcttaacatctgtaggatctgtgtcaagtcccttctttcattcccgatattattatatcttctttttaaaatgttttattatcaattgtggtaaaatacatataacacaaaatttacagtcttaatcatttttaagcatacggttcagtggtattaagtatattcacattgttgtgcaataatctccaccatctgtctccagatttcaacctgaaaaactgaaaccctacagtcattaaacaataactccctattccctgcttcccactgcccctataaccaccattctactttccgtttctatgaatttgacaactttagagacctcatataagttaaacggtatctgtctttttgtgactggtttattcacttagcataatgtcttcaagatttatccatgttgtcccatgtgacaagactttcttcctttttagggctgaatattattcattctaaatgtaccacattttgctaatctattcatctgtagatagacatttatgttgcttctacctcctgactattgcaaataatgctgctatgaagatgaatatgcaaatatctcttcaagaccctgctttcaattcttttggatgtaaaaagaattcccagaagtgggaatgttggataatgtaattctatttttaattttttgaggactaccatgtcatttccaacagcagctgtaccattttacattcttaccaacagtgcacagggctccaatttctccacattctcaccaacactttttttttcacagtagccatcctcatggatgtaaggtaacatctcatcatagttttgatttttatttccctaatggttagtgatgttgagcaacttttcatgtgcttattggccatttttatatcatctttggagatatgtctattcaagtcctttccccatcttttaatctagttttttttattgttgttgagatgagttctttacatattcgggatattaaccccttttcaaatatatgctttgcaaatatattcttccattccattgactgctttttcactcagttgattatgtcctttgatgtacagtttttaattttgatgtagatagtttttaattttgatgtagttcaatgtatctttttttttatttgtctgtatatttggcctcatatccaaaaaagaaatcactgccaagaccaatgtcataaagcttttccctatgtcttccgtatgtttccctattatagctcttatgtttaggtctttgatccatttttagttaatttatatatgatgtaaagtgagagtccaacttaattctattgcatttggatatccttttttcccaacaccatttgtggaaatgactgtccttttcccaatgaatggtcatagcacccttatcgaaaattatgtgaccatatatgtcagggtttatttctgggctattgtattccattggtctatatatttgtctttataccagtaccacactgttttgataacagtggctttgcagcaagtttccaaatcaggaaatgtaagacctccaacttcgttttttttctaaatttgttttagctactcaatgtcccaagtgattccatgtgaacttcaggatactgtattagtctgttttcacactgctgataaagacatacccagattggggagaaaaataggtttaatggactcacaggtccacatggctggggaggccgcacaatcatggcagaaggcaaaaggcacttcttacatggaggcagcaagagaaaatgagaatcaagagaaagggtttccccttataaaaccatcagatctagtgagacttatttactaccacaagaacagtatggaggaaacagccatgattcaattatctcccactgaggccctcccacaacatgtgggaattatgggagctataattcaaggtaagatttgggtggggatacagcctaaccatatcagatgcatttttctatttctgaaaaaaatacactgttggaattttgacagagattgtatggcatctgtagattatcttgggtagtattaaccgcctaataatattaagtcttccaatccatgaatacaggatgtttttcattcattggtgtctttttagattctttcatcaaggttttgtagttctcagtgtacaagtccttcacctccttagttaggcttattcctaagtaatttattctttttgatgctattgtaaatgagattattctcttaatttgcttttcagattgttcattgttagcatataaaaatttaattaattttttgcactgattttgtatcctgcaactaagctaaatccatttgttagttctaacagcttttgtgaaatccttagggttttctacatataagatcatgtctgtgaacaaagataattttccttcttccttttcattttggatgactttttctttttctttttcttgcgaattgcctatgttgaatacacaaggcaaaagacagcatcctttctttgttcctgatcttagaggaaaagctttcagtctttcactataagaataatgtctataggctttaaatagatggcgtttattttgctgaggtaatttccttatcttcccaatttaagtttcttcttatcaaaaaagggagttaaactttgtgaaaagatttttctacctcaattaagatgattgtgtgagggttttctcctttgattctgttaatgctaatgtagtatatcacatttactgattttcatatttggaaccattcttgcaagttacgaataaatctcatttggtcatgatgtgtaaacctttaatgtgctgttgaattcagtttacaagtattttcctgaggcctttgcagcaaatatttgtcaggatattggcctatagttttctttccttgtaccacatttgtctagttttagtatcaacttaatgctggcctcacgtgataaatttagaagtgtttcctcttcaatgtttttgaaaagtttgaagagggattggcattaattcttctttaaatgtttggtaaattcaccaatgaagccacctggtcctgagtttttgtctgttgagaggtttttgattattgattcaatctgcttactaaaggtctgttcagatattctattcttcataatttagtcttggtaggtcatgtgttgtgagaaatttgttcatttcacctaggttatcaaatatattgacatatggttgctcatagtcctctcttacaaccctttttctttgtgttaaatttctctctgattttagttaatgagtcttgtttctttttttcttacccatgtagttaaaagtttgctcattttgctgatcttttcaaaaacccaactcttagtttcattttctctactgtttttctgtttcatattttatttccttccttctgttagctttaggtttagtttgttctttttctagttccttaaggtgtaaatttagggtttttttttttgtttgtttgtttttttttttttttttttttgagatggagtctcactctgtctcctaggctggagtacagtggtgtgatctctcagctcactgcaacctctgcctcccaggttcaagtgattctcctgcctcggcctcccgagtagctggcactacgggcgcatgctatcatgcccagctaattttttttttttttttttttaagtagagacaaggtttcacccggttagccaggatggtctcgatctctcgacctcatgatccgcccacctcggcctcccaaagtactgggattacaggcgtgagccaccgcgcccggccttttttttttttttttaagatggagtctcactgtgtcacccaggctggagtgcagtggcacgatcttggctcactgttagctccacctcccaagctccagcaattcttgtgactcagcctcccaaggagatgggactacagacatgtgccaccatgcccagctaatttttttttgttatttttacaatacaaaatacagtacaatacccctagtagagacggggtttcaccattttggcgaggctggtcttgaactcctgacctcaagcgatctgcctgcctcatcctcccaaactgctgggattataggcgtgagccatcgcacccagccactggagtgttctttatgtctgttaggttcaactggtctattgaattgttcaagtcctctgtttagtaaccttctgtcatttgttctatccggcgtattgaagttccccacactggagtatgtgcattctacagttattggatggggtattttataaatgtcaattaggctgtggtagttcagagtattcctcaaatcttctacatcctttttgactttttggtcaagttgctccatcaattcccaagaaaaggaataataaatgcaataatgtttatgcatttgtctgtttttccctttggtactattagtttttgcttcatgtatttttgaagctcttttgtttgctaaatacacatttataatcattacatcatgcttatgaatagactctttaccattacaaaatgactatttgtcttataatttttccttgttgtgaaagtctattttatctgatattcagtatagccattccagcttttttatgcttattgtttccatgatacatctctttgcatccttttactttcaagctatttatctttgtatttaaagtatgtctcttataaataatataaagttggctcttgctttttttatccaatccaaaaagcactgtctttggcttccagtgttgagttcatttatatttaatgtaattatttatggttctatttagtctgtcattttgctattggttttgtcacagctcttctttgctcctcgtttttccttccctgccttattttatgttcactgaatattttatagtattccattttaatccttctagttacacatccttctagctatacctagctatatgtcttttcattatatgcttagtatttgttctaagtatgtgctaggcaacatctaagatggctcccaattttccccaactcctggtatgcatgcccatgtggtatgtcctttcccttgagtatagtctggacctagaaacttgcttttaataaacagaatccgacaaaagtgataagctataatttccaagattagcttacaaaaagattctagcttccatcatgcttacctctctcttgctctcttacttgtccactttgatggaagccagctgccatgctgtaggctatcctatagagaggcccaaataggaaaaaactgagagaaacttttggatgacagccagcaaagactgacgccctcagagcaataccccagcaaggacctgaatcctattaaccatatgagtgagaatagaagtggattctcccccaatctagacttcagctgggaccacaaccccagtcaatactttgtttgcaaccttataggagaacctaagccagaaaacccagctaagccatgtccatgagaaaaaaattaaaaaattttaaaaaaattaaaaaataaatgttgctttaagctgctaagatttagagtaatttgtaatggaatttctcttagatgttgcctagcacatacttagaacaaatactaagcatataatgaaaacacgtatagctaggtatagctagaaagacatgcaatagataactgcagatatctgtattatagataatacagattttggtatctgaaagtaaagtacagcctaagaatatggaaacatctttgtgtgtagtgtgctaaagacaaagttgatttgaagaggtcattagtaggaatctggaatttgaggatattgccagtggggctcaagaggaagtaagaaatctgttatcggaaatgagaagaagggggatcctttttacatagagatagaaagctataccatcatcttcagtaacacaaaaattagaaaatatgcttgaggaactaagtgagtaatatagctaagaagatttacaaagtatttgctattgctttaagtgctgtcgctcttaggtgcaagagtagagtaaaattgagtcaaggaaagttaaagaaaatggaactaagacttcatggttttaaaaattctcagcctctctagatggcaaaatatcctaaattaagaaagtccaagcaaactttggacactgcatagacataaagccaagggtataaatgtaaaatattttgtgaagatcgaaaagataaaagatggtatatctcagagtactatgcattcatccacagatccccttaaaaagattaagagtatgcctgacagatcctctcaatcaaacaagagggcctctacaaaacttaagaatgacttaactaagaaaattccactacttgcctatctggatttcagaattgttatgaactagtgactttttagaaatgtctgtggaggttatcctctgcttggcccattgtatgttgggtgtgttaggagcagataactattagaacagacatttcttcaaagaagatatacaaatggctaataagcacatgacaagatgctcagtgtcattagtcactgggggaatgcaaattaaaaccacaatgagataccactgcataccaactaaaatgcacaaaatcaaagccactgacaataccaagagttgatgaggacgtgaagagacgagaatactcatgtgaagagactggaatattggtaatggggatacaaaatggaacagccagtttggaaaagagtttgatgattttttaagttaaaaataaatttaccacacaacccactcttagatatccatccaaaagaaatgaaaaacatatgtccgaataaaaatttgcaatgaacttccaaaacagcaacattcataatagccaaatactgaaaacaatccaaatatccattaactggtgaatggataaacaaaatgtggtatactcatcaatgaaataccactcaggaacacgaaggaatgaactactgatacaagaaacaatatgaacttcaaaaacaatattgtaagtggaagaactagatacataggactacgtattacccatgaaatttctagaaaaggccaaaaaaaaaaaaaaaaaagataattgcttgcctggggctctgggtataagtccatattataaagatatcaattcttcttaatttatctatagattcaatgcattcataataaaatatctcaacatgcacgcacacatgcacacatcacatttatatgcaagtaaaaactggtgagctaatcctgaaatgtatatggaaatgcaaagaaccaagaatagccaaggcaatcttgaggaagaaaaagaaagctggaggacctacactacactataaaatatcaagatttattttaaagctacagtattaaggcagtgtagtattagcacatagataaacaggccaatgaaagaaactagagaccagaaaaaacccacacaaacaagatctcctggtttacacaaatggtgccaagggccgggtgtggtggctcacacctgtaatcccagtactttgggaggcagaggtgggtggactgcttgaggtcaggagttcgagaccagcctgaccaacagaatgaaaccctatctctactaagaaaaaaaaaaaaaaaaaatacaaaaatcagccaggtgtggtggcacatgcctgtagtcccacctattcaggaggctgaggcaggagaatctcttgaacatgggaggtggaggttgcagtgagccaagatcacgccactgcactccagcctagcaacagagtgagactccgtctcaaaaaaaagggggggccaactacagcagtgtgaatgacatttaaaaataatgctaggctgggcacggtggctcatgtctttaatcacagcactttggaaggccgagatgggcagatcacttgaggtcaagagttcaagactagcctggttaacatggtgaaaccccgtctctactaaaaatacaaaaattagctgggtgtgggggggggagcctgtaatctcagctactcagaaggctgaggcaggagaatcacttaagcccgggaggcagaggttgcagtgagccaagatcgtgccactgcactccagtctaggtgacagagcgagactctgtgtagaaaaaataaataaaataaaataaaaataatgctagatcaaacacatatccattgtgatagacagagggaattagccatgacccctacctcacttcatacataaaaatcaattccagatgtaccacatacctaaatgagaaaggtaaaataagaagcttctagaaaataacatagatgagtactctctgatcttgtaacaggcgaggtaagaaatctcaaacaggaaacaaaaaaaaacaacagagtcaactgacaaaactatattaaaattaataacattcaacagaagataccagttgctatggtttctctgctccaaaactcatatttaaatttaattgccattataacaatattaagaggtgtgacctttaagaggtagttaggccatgaaggctttgccctcataaacaattattgccaaagtggattagttatagaagggctagttaggcccacttctctttctccctccctccctctctctctctcttctcactttctgccataggatgatacaacaagaaggtcctcatcagatgccagcaccttgattctggatttctcagcctccagaactgtgagtcagggccaaatagaaacagctccagtcaggagctcccagtgaaatcaatgcagaaggcaggtgatttctgcatttccaactgaggtacccggctaatctcactgggactggttagacagtgggtgcagcccacagagggcgagccgaagcagggtggggtgatgcctcacacaggaagtacaaggggtcagggaactccctcccctagccaacagaagccatgagggactgtgccgtgagggacagtgcattctgacccagttactagacttttcccatggtcttcacaacccacagaccaggagattcccttaggtgcctacaccaccagggccctgggtttcaagcacaaaactgggtggctgtttgggcagacatcgagatagctgtaggaggttttttttttttcataccccagtggcacctggaatgccagcgagacagaaccgttcactcccctggaaagggggctgaagccagggagccaagtggtctagttcactggatcccacccccacagagcccaacaagctaagatccaacggcttgaaattctcactgccagcacagcagtctgaagtcgacctgggatgcttgagcttggttgggggagaggcatccgccattactgaggcttgagtagccgggtttcccctcacaatgggcaagttcgaactgggcaaagcccactgcagctcagcaaagtcaatgtaaccagactgcctctctagattcctcctctctgggcagggcatctctgaaagaaaggcagcagccccagtcaggggcttatagataaaactcccatctccctgggacagagcacctgggggaaggggcggctgtgggcgcagctccagaagacttaaaccttccttcctgttggctctgaagagagcagtggatctcccagcacagtgtttgagctctgctaagggacaggctgcctcctcaagtgggtccctgactcccatgcctcctgactgggagataactcccagcaggggtcgacagaaacctcatacaggagagctccggctggcatctggcggatgcccctctgggacaaagcttccagaggaaggaacagacagcaatctttgctgttctgcagcctccactggcgatacccaggcaaacagggtctgaagtggacctccagaaaactccagcagacctgcagcagaggggcctattagaaggaaaactaacaaatagaaaggaatagcatcaacatcaacaaaaagggtgtccacacagaaaccccatctgaaggtcaccaacatcaaagaccaaaggtagataaagccatgaagatgaggaaaaaccagcacaaaaaggctgaaaattccaaaaaccagaacgcctcttctcctccaaaggatcacaactccttgccagcaagggaacaaagctggacagagaatgagtttgacgaatttacagaagtaggcttcagaaggtgggtaataacaaactcctctgagctaaaggagcatgttctaacccaatgcaaggaagctaagaatcttgaaaaaggttagaggaattgctgactagaataaccagtttagagaagaacataaatgacctgatggagctgaaaaacgcagcacgagaacttcgtgaagcatacgcaagtatcaatagccaaattgatcaagcggaagaaaggatatcagagattaaagatcaacttaatgaaattaagtgtgaagacaagattagagaaaaagaatgaaaaggaacaaagtctccaagaaatatgggactatgtgaaaagaccaaatttacgtctgattggtgtacctgaaagtgacggggagaatggaaccaagttggaaaacactcttcaggatattatccaggcaaacttccccaacctggcaagacaaaccaatattcaaattcaggaaatacagagagcactacaaagacactcctcaagaagagcaaccccaagacacataattgtcagattcaccaaggttgcaatgaaggaaaaaatgttaagggcagccagagagaaaggtcacgttacccacaaagggaagcccatcagactaacatcggatctcttggcagaaaccctacaagccagaagagagtgggggccaatattcaacattcttaaagaaaagaattttcaatccagaatttcatatccagccaaactaagcttcataagtgaaggagaaataaaatcctttacagacgagcaaatgttgagagattttgtcaccaccaggcctgccttacaagagctcctgaaggaaacactaaatatggaaacgaaaaaccagtaccagccactgcaaaaacataccaaattataaaaaccatcgacactatgaagaaactgcatcaactaacaggcaaaataaccagctagcatcataatgacaggatcaaattcacacataacaatattaaccttaaatgtaaatggactaaatgccccagttaaaagacacggactgggaaattggataaagagtcaagacccatcagtgtgctgtattcaggagacccatctcacatgcaaagacacaaataggctcaaaataaagagatggaggaatatttaccaagcaaatggaaagcaaaaaaaaaaaaaaaaagcaggggttgcaatcctagtctctgataaaacagactttaaagcaacaaaaatcaaaaaagacaaagaagggcattacataatagtaaagggatcaatgcaataagaagagctaagtatcctaagtatatatgcacccaatacaggagcatccaggttcataaagcaagtttttagagacctacaaagagacttagactcccacacaagaatagtgggagactttaacagcccactgtcaatatcagccagatcaacaagacagaaaattaacaaggagattcaggacttgaactcagctctggaccaaatggacctaacagacatctacagaactctccaccccaaatcaacagaatatacattcttcttagcaccatatcacacttattctaaaatcgtccacataattggaagtaaaacactcctcagcaaatgcaaaagaacagaaatcataataaacagtctctcagaccacagtgtaatcaaattagaactcaggattaagaaactcactcaaaaccgcacaactacatgcaaactgaacaacctgctcctgaatgactactgggtaaataacaaaattaaggcagaaataaagatattcttggctgggcacagtagctcacacctgtaatcccagcactttgggaggccgagggaggcggatcatgaggtcaggagatcgagatcatcctggctaacacagtgaaaacccatctctactaaaaatacaaaaaatgagccgggcgtggtggtgggcgcctgtagtcccagctacacaggaggctgagacaggagaatggcgtgaacccaggaggtggagcttgcagtcagccgagatcgcgccactgcactccagcctggatgacagagcgagactccatctcaaaaaaataaaaaaagaaataaagttgttctttgaaaccaatgagaacaaacacacaatgtaccagattctctgggacacagctaaagcagcgtttagagggaaatttatagcaccaaatgcccacaggaaaaagcaggaaagatctaaaattgacaccctaacatcacaattaaaagaactagagaagcaagagcaaacaaaatcaaaagctagcagaagacaagaaataactaagatcagagcagaactgaaggagatagagacataaaaaacccttcaaaaaatcaatgaatccaggagctggttttttgaaaagattaacaaaatagatagatcactagccagactaataaagaagaaaagagaagaatcaaatagacacaataaaaaatgataaaggggatatcaccactgatcacacagaaatacaaactatcatcagagaatactataaacacctctatgcaaataaactagaagatctagaagaaatggataaattcctggacacatacaccctcccaagactaaaccaggaagaagtcaaaaccctgaatagaccaataacaagttctgaaattgaggcagtaattaatagcctaccaaccaaaaaaagcccaggtccagatggattcacagccgaattctaccataggtgcaaagaggagctgttaccattccttctgaaactattccaaacaatagaaaaagagggactcctccctaactcattttacgaggccagagttatcctgataccaaaacctggcagagacacaaccaaaaaagaaaatttcagaccaatatccctgatgaacatcgatgcaaaaatcgtcaataaaatactggcaaaccgaatccaacagcacatcaaaaagtttatccaccacaatcaagttggcttcatcactgggatgcaaggctggttcaacatatgcaaatcaataaatgtaatccatcacataaatagaaccaatgacaaaaaccacatgattatctcaatagatgcagaaaaggccttcaataaaaattcaacaccccttcatgctaaaaactctcaataaactaggtattgatggaatgtacctcaaaatagtaagagctatttatgataaatacatagctaatatcatactgaaagggcaaaagctgcaagtattccctttgaaaaccggcataagacaagatgacctctctcaccactcctattcaacatagtattgtaagttctggccagggcaatcaggcaagagaaagaaataaagggtattcaaataggaagagaggaagtcaaattgtctctgacatgactgtatatttagaaaaccccattgtctcggcgcaaaaactacttaaggtgataagcaacttcagcaaagtctcaggatacaaaaatcagtgtgcaaaaatcacaagcattcctatacaccaataacagacaaacagagagccaaatcatgagtgaattcccattcacaattgctacaaagagaataaaatatctaggaatgcaacttataaggaatctgagggacctcttcaaggagaactacaaaccactgcccaaggaaatcagagaggacacaaacaaatggaaaaacagtccatgctcatggataggaggaatcaatacagtgaaaatggccatactatccaaagtaatttatggattcaatgctatccccatcaagccaccactgactttcttcacagaattagaaaaaactactttaaatttcatatggaaccaaaaaagagcccacatagccaagacaatcctaagcaaaaagaacaaagctggaggcatcatgctacctgacttcagactatactacaaggctacaataaccaaaacagcatggtactggtaccaaaacagatatataaaccaatggaacagaacagaggcctcagaaataacagcacacatctacaaccatctgatctttgacaaacctgacaaaaacaagcaatggggaaaggatttcctattaaatggtgttgggaaaactggctagccatatgcagaaaactgaaacttgaccccttccttacatcttatacaaaaattaactcaagaaggattaaagatttaaacataagacctaaaaccataaaaaccctagaagaaaacctaggcaatatcattcaggacataggtatgggcaaaggcttcatgattaaaacaccaaaagcaatggaaacaaaagccaaaattgacaaatggaatctaattaaactaaagagcttctgcctagcaaaagaagctatcataagagtgaacagacaacctacagaatgggagaaaatgtttgcaatctatccatctgacacaagactaatatccagaatccacaaggaacttaaagaaatttacaagaaaaaaaaaacatcaaaaagtgggcaaaggatatgaatagacacttctcaaaagaaggtatttatgccaccaacaaacatacgaaaaaaagctcatcatcactggttattagagaaatgcaaatcaaaaccacaatgagataccatctcacaccagttagaatggcaatcactaaaaagtcaagaaacaacagatgctggagaggatgtgaagaaataggaatgcttttacactgttggtgggagtgtaaattagttcaaccattgcagaagacagtgtggaaattcctcaaggatctagaaccagaaataccatttgacctagtaatctcattactgggtatatacccaaaggatataaatcattctactataaagatacatgcacacgtatgtttatttctgcactgttcacaatagcaaagaattggaaccaacccaaatgcccatcaataatagaccggataaagaaaatgtggcacatatacaccatggaatactatgcagccataaaaaaaaggatgagttcatgtcctttgcagggacacggatgaagctggaaaccatcattcttagcaaactaacacaagaacagaaaaccaaacaccgcatgttctcactcataagtgggagttgaacatgagaacacatggacacagggaggggaacatcacacaccgggtctgtcaggggattgggggctaggggagggatagcactaggagaaatacataatgtagattatgggttgatgggtgcagcaaaccaccgtggcatgtgtatacctatgtaacaaacctgcacattctacacatgtatcccagaacttaaagtatattaaaaaaaagaataaaaaaactctgcacgaatttaaaaataagtaaatacatatcacattacactgtaaaaaaaaaacttaaagtataattttcttaaaaatcagatgcagaactgtgagtcaataaattctgttcattataaattacccaatctcaggtattctcttacggcagcacgaaatggaccaagacacaagtgaaagtgaaaatgcaagccacagagtgaaaaaagatatttgcaatacatatattcaacacagaattagtatccagaatatacaaagacaaatcgacagtgaaaagacagacaaaccattttttccatacttaaaaaagatcaaagactcaaccagaaacttcacataagaggatatccaaatcatcgataaacattaaaaaagatcttgatatcattagtcatgaaggaaaatgcaaattcaaactatacatctgccataccagaattgctaaaattattaaaaacttacaaaccgagtttcagcaaggatggagagccatgggaactttcaatcttgctagtggaaatgtaaactggtacagccactttgagaaattttatcagcagtgcctactatgattacacttctaagtcaacactcaaaaaaatgtgtatacttgtgtactaagagacatgtaaaagagtattcacagtagaatcacttgtaatgtcaaaaaccaaaagtccaaccatggtacaatggatatataaattgtgatatattcatacaataattttaaaaatccattgctaaatgcaacaacatggatcaatctcacaacataatgttgagcaaaagaagacagaaacaaaagggaacacgctttatgaatcaaaaacaatgaaaacgaatctatggtaacataatacagaatagtggttccttcttcaagaggtgataaatgactgggagagagcaagaaagagtttctggggaggtagctatattctctatcttgacctggaaagagatttcacagatatatacattttgtaaaacttcatcaagctttacactttgatgtgtcttgttgtatgtgtgttgtattttgattttaacattttaccaaaagacaaagaatgaactatagctatatttattaacatggataaatctgaaaaatatgatgagttaaaggagcaagtctcaaaataatatatacagtatgattccacttacatgaaattcaaaatagagaggtaaataactgattaacacaaaatacaggacagtaatttcctctcaagcaaagggaagaggcaatcggagaagggtacccagcggtcttctggagaactgtaatatactatttattggctaggttgaaagtatagaaatgcttatcttctagtggctctttaaagtgtacctatgcactgtacatgttttttgcatgcatgctatgtttcacagctgtaaaatattttaagagtaatacaactactgaattacaaattatcagaaaaccaaaatgagaacttctgattttctgtcttttcatttatctgagcagcaggtaatattgttatataccatctgcagaacagtcttctttgggtatattactaaatatacttatgaaacataaaaataaataacaattaataatccagtaaagtatcaaataatgctgaaaattaaaaaatgaaaataacttccaaaaatccacaacatacttattttaatttttcaaaaagaactttattagaaagaaaaagaaaactaaatgaaaaaaaatgagatgcttaacaaaactagaaaaaggtgagcacagatccataaacactttaagacttcgtatttccaactacttactttaaaatggcacacttgattttaaaacttaaaaataaaaacaaatttaaaaatcgtacatttaaatcattgtttattaatatatctctgacttagaacactcaatatttaaatttcattaaaattaaatgttaaaatataagctgttatccatttttgtttattaaaaaggacaacccaaactgttcaatattacctgacaaacagaaacttgtgaaattaaaagatgtcattacaaagcctcactcattaaaagaaagaaaaagagaaatgtgactaaattgtcagaaagctgacttactgggggagaaaaaagcctaaatggcccaaggaccattattttcaaagctgctccatcccagttacaaatagttgccacttggcctcatcttagtaaatacctaagagtgacatttaattagcacattaatgttgaaaattaatgagtagctaagaggttttatatgtgtgaaatgttgtattttattgtgtactctaacaagcagttttcacttctcatttatgtagcagtcctatttctagagtacaaggttaagtgtctatcagcaagtgtccattgtataaaagattgtcaaattagtcagatttggccaggcacagtggctcacgcctgtaatcccagcactttgggaggccaaggcgggaggaccatttgaggtcaagagttggagcccaccctggccaacatagcaagaccccgtctctaccaaaaatacaaaaattagccaggcgtggtggcgggcacctgtaatcccagctactcgggaggctggggcaggagaatcactgaacccaggaggcagaggttgcagtgaggggagatcgcgccactgcactccagcctgggcgacagtgcgaaactctatctcaaaaaaaaaaaaaaaaaaatggccagcatggtagctcatgcctgtaatcccagcactttgggaggccgaggcatatggatcacaacgtcaggcattcaagaccagcctggccaagatggtaaagccccgtctctactaaaaatacaaaaattagttgggcgtggtggcaggcgcccgtaatcccagctattcaggaggctgaggcagagaattgcttgaacacagaaggcagaggttgtggtgagccgagatcgtgccattgcactccagcctgggcaacaaagtgaaactccatctcaaaaaaaatatatatatatatacacacatatatgtgtgtgtgtgtgtgtgtgtgtgtgtgtgtgtgtatatttatttataaacagtttcttttttgttagtaggagctcctctgacagcagaaattgaccaagagcaactagatgttgatcatgggtgatcatcaccaaaaaagggagctgcccgtgaaatgcaagtaagcacagaagaaaggtctcccatgtggcagagccagtttctatgcaccagcacccaagccctagtccccattcctaccccacatccccaccgagacagagaacaggccaccagctctccatctggtcagtcaggttttgcaatggccaagcagaagattcggatctggtactgttctgcccaacacagtagcccctaatcacatgtggctatttaagttaattaaaattagaaattcagtttttcaatcacaccagccacatttcaagtgttcaatagtcacgtttactggtggcgactgtattggacagtgccgcctatagaacattaccatcagaaagttctattgaacagtactgctgtagaacacatatctgcccaaacatcagggttattcacaaataaaatgaatgtacttttggcaggtaatatttaagaaggttttactaagaaggaaaggtattgattggctccttgctaaattatccaacaatttcaggaggagcaatttataatgttatatagtatcatttacatataaaagtggagtttaacaaagtaaaaagattcttttgcatgcccagactaaaaaattaaatcaatatttttaaagtgaaaaatgtttgctcacatagattaacttcttcaaccacaagtgggttttcattatacttgatcaccatctgctggccatgttattaaactgcacacacaaatgaaatgctagctatattggggtaagacatacagaatcccagctttttgccacaatgcattcctggaaaaccatatcataaagaggatcattataaagcaagtcacattttccataagggcaggaccataattagaatcttcattccaaactaaaatctagcatcaaataacccatggcaaaatctcattaaagcaaagatgtaaaaactatagtcctctataattatttaaaataggataattattctccaagttctttcttacaggtatgaacacatgtattatttagatgacccaacatgagttaaaagataaatataatttatataaaattagcctaaatctgatatggtaaaaatagtaggtagttaataataattatttgcactctcctagaaatcctaagcaatctggtgtaggctcctaataaaatggcacctaattaaatgccttctttttcatcaataaattcctctcaaataagcagaagcaacgtgtttcttccattgtaaagcagtgtttaaaggtcagggtttatttaacattactcctcttcaccctaccctaacttttaatcaaagttttcagtaaaaataataagtgctattaaatcatttttttacatctttccctatcccagaacctcactgcactttggtgataagctaccagaccacgtatacttcactgaaaagacataaaattactacaagccattaacaagaagcttcaaaacatttttcacagaattgtaaagcaagaatacaacctattacttttgtgttctttgagataaagcatgaagaatatatagatgatgtgaactaaaatcaaaatattagttaccagccgagcacggtggctcacacctgtaatcccagcactttgggaggccgagggagggggatcacctgaggtcaggagttcgagaccagcctggccagcacgatgaaacctcgtgtctactaaaaataaaaataaaaaaattagccaggcgtggtggcacacgcctgtaatcccagctactcaggaggctgaggcagaagaatcgcttgaacccgggaggcagaggttgcagtgagccgagatcgtgccactgcactccagcctgggtgacagagcaagactccatctcaaaaaaaaaaaaaaaaaaacacacagttacttaggcagcttcaaatatatggcgtgaaaaaatgtaaacaatgaggccagccactgtgtgttccttctatccttgaaaaagaggcctattacattgtttaaagattcctataaagcctcttttaaaatagaattaccattctttattttgatattgtgcaggattcatacttacaatcataacctttctgcagagtcataatttatttttctcagggaatacaaaatgacttttagtaactgaaaataattaatgaccaacagactttaagataataccctttgggaggattagtaattagggaagcaaaagcatggtcaaacaatctaacaagcaaggccctgatgaactattacaataatgatcaccataccagtgatgatggtggtagccgcagctaacacttaacaggccctctgtcaagggctctacacgtcttatttcactttgtccttacaactccatttgcaaatggagatagtggtagtactaaccccgaagttagtactaccactatctccatttacgagtgatgaaactggggtttagagaaattaagtaacttgcctgaggacagatggttgccaagtgtcagaagtggaatgtgaacaaaggcaaactgctttctttcagctcaacctagaaataaccaaaaacaaaggtatagctgcccaggattgctgacgcagcacaagtggaaaaaaacagataaaactgaaatttccatatttgctgcataaagtacttatgcctatatgatacactagaaagaacatgggtgtgaaatcataaggccctgcattccaatattggatccatcactggaaaagtcactggactttcctgaagctgttatcttgtctataaatacaaaagggcaatgatgtcagcctcactggactatagagaggattcaatctgatgacttggaaaagatttctagaacagtacctagcatgcagtaggagatccataaatggtatgacttgcctcacttggcctctgctttcacaaattagaaatacaagtggaatccacaaacatttatttactagaaaattttttatttttatgtttaaatgtatatatatctgttatacaaatttattaatttgcaatgtgtatgcacaaacattttaacaagatgatatttcagaaggcaactgaacagtatctatcaaaataagagtgtgattattagaaataccatagacacattttttttacaagaacgtttttaaatgtacactccaaactagtccaaatccctaaagctaaccacctttaacagtttcatgtgtggtacccagaaagattccctgcacacgaacacatatgtatccacagagcctctaaaacacatatacacaaacacaaacggaagcttcctatactttatgtacttctttttaactttatcctattagatcttgccataataacctatatatatgtgtgtgtatatatatgtgtatatgtgtgtgtgtgtgtatatatatgtatatatatgtgtgtgtatatatgtatatgtgtgtgtatatatgtatatatgtgtgtgtgtatatatatgtatatatgtgtgtgtatatatatgtatatatgtgtgtgtgtgtgtatatatatatatatttttaaccattgcacaagatgttgaaccaactaataactccaccaacaaagcaatttctcacctaggagtccataatagcccaaaacagatgcaggcatataataatccttcttgatattctaactgataatttggcatcttgaaatcatggaccaaactaacagccaaagttgtccacatccttaccattcctgtctttttgtgggcacttggaaattatattacaaaccctccaactacaaaccccaacatcggtatttcactttctgtccaatagggaacatcccaccactatataaaaaggctctcacccatgcttctccttgctacttctgcctcctgaccaacccttgtgcttctccacatggcctgcatggtgtggcatgcctccctcctcttggaaactgtgagaaataaactcttctttcaaaggcaacttgtctctatgtctgtcatcgtataatgtctgattaaaacaaaccctgggtgcatttttaaataaggtgcctgatgatggattactaggatgtaaactcaggcattctttataacaataaaaaattaaaagcagaagagacagattaaattatagtatatccacattatggattatctgtaatttagaagtccacatgatacaggtttaagacatagctgagtaaaaaaaagagcaagtctcagaacagtatgtacattatgagccaatttttaatttcttctttttttttttttttttttgagacagagtctcactctgtcacccaggctggaatgcagtggtgcaatctcagctcactacatcctctggctcctgggttcaagcgattctcctgcctcggcctcccgagtagctgggactacaggcacccaccaccatgcccagctaatttttttgtatttttagtagagacggggtttcaccatattggccaagctggtatcgaactcctgaccttgtgatccgcccgccctggcctcccaaagagctgggattacaggcataagccaccgcacccggcctgtaatttcttaattatataggtgtggatgtctattgtaaaatgatatgcacaaaattgttaatggtgattaccactccaaagtgggataaagaggacacagaaggattgtgactttttactctaaatatttctatattgaggtttttataaacatgtattatatatatagattgcatacttttccaaaatgaggataaagactgtactagtcatctattgctttataacaaattattacaaatttaacagctttaaacaacacacataaatgttctcatgtttctgcaggtcagaagtccaggcacagctgaactgggtcttctgtttagggccacaaaaggctgcaatcatgattggaccagacctgggttctcatctagaggctcaactagggaaggattcacttcccgacttgtgtggatgtcagcagcattccgttccttatggctatctgattcatgtatgatttgtggcagctgcattttccaaaaccagcaaacggaatgacagcaagtctactggcaagatgaagtaatgtaatcctgggaataatatcccattaccattgccataatctattggttagaagcaagtcacaggacctgcccacactcaaggggaggggattatataagggtatgaacaccagaaggaggatcatgaagaccaccaacaagacaattaaggtctttatcagacctccatggtaagtatctgaaggctgatcagaaagataatatatattgatatagctcatgattgtagatctaaatgaaattaaccaaactatacatgcatgagatctaagtctatggtctccttagtaacattttctaaagtcatgctccaaactcaaatataactaaaatatttcattgtcaagaaaataggcagataggccaggcatggtggctcatgcctgtaatcccagcactttgagaggccaaggtgggcatatcacttaaggtcaggaattcgagaccagcctggccaacatggtgaaaccatgtctctaccaaacacaaaaattagccaggcatggtggtacgcacctgtaatcccagctactctggaggctgaggcagaagaatcgcttgaacctgggaggcagaggttgcagtgagccaagactgtgccactgtactctagcctgggtgacagagtaagactctatctcaaaaagaaaaaaaaaagaaaaagaaaataggcagatatttgacataaaaatgcagtaacagatatataatagcaatgcaatgtggaacagtagtttttcttatagaaaatatgggcaataagattatcttaaaccaagaaatatgaaaaatgaaagcaaagaagagaaccaggacaggactactagctaagtgttgaagctgtttggtgtgaaatgctaagtacactagtatataatgtatacttggtggaaaaaataaagcgtgagaataagccagatggagtatgacctcaccatacttctaacaagtttggaacaagactatataccatatcctacaggaagaataaaagtaaaggaaaggtgccatctctactgaatagagagtcctaacaaaaaggcttcaaaaggactctgcatctttaataatataaaaaggctaggacacaaacagcatcatctaaaatgccattagaaatacttcacatacaaaaaggtctaagtaaagcaggattttataaagtgatcaaaaaagaaacactaagggggaaaaatcttttaagattaaagaggtttttcaaaggacaagttgaagtggctgtaaaatttatgaggcagcattaaacttcagttctaagtaacaataaattattcaccataaaaacatacatgtgtcaaatattataagcctcttaaactttttaaaacaatttcttgcagaactgattagatatattaagtcaagattagcagatactaactttttcattagcatactatgatcactcagagtaaaggaggaaatttagaaaagaaataagacagaaccatcaatagtcgattcaccaccaaatgtgatctgatgtcacacatgatacatatttcaccttaagattagtttccttggctttagctaaagtaaatgttagttttatttttaaatgtcttcatgtatgtaaaaactacaaatatctgttaactaatgtaaatcaaattaaaattgtaaaaataatcaagttaaaactattaaattaaaagaaacataagataccctgagatattttgttttggcagccctaattgaccttagtgattctgacatttgacagaggatattttaagcatgtcctttccagctccttcattgtcattcctcacagtgtgtgaagggaatcgctataaactacatctaagcttccctctatattttctaaaatttatgcttccctcaacgttttctgaaatgttaaaaagaaaaaaaaatccttttaggccatttcctctgtcacaatatacccgtttcaaagggattttgtacagattaaattaaatatgtggcagtgtctaacacaatctacttgttcatgaatgcattcactgttgaatatagatacttacagaattcctaacacgttccttcccagtgctaggggctggaaatatagcaaatacagcaaacagcaaaaacacaagttcctacctcatgaaatttacaatctagcacacaggacagatagtaagcctctacacatgggatgaaggcagcaaagaaacacagagtactaaaggagtaaatggcggggtcgcctaaactgccctgggatatcagataaggcttttttcacgttgcaatctctgaaggatgggtaggactcaccagagtgcctgcttttcccattacttattatataactgacaacgaatgcctcatactctagcaatccttttgcattaaaacacctttaataataggtgaccaacaaagagaattaagttattttttacaattgtggggattttactatggttccatttctcaaaaaagtcaatggctaatagttgaaggatattctcattgtattttctcaaactttatcctgtattccaaagaagaaaaaaatctattcacccggactccctggaaatctcaagtctatttcctaccctgaacccttctcttatacacacctgaatccttgcaaatacttccatgactaagcatagccactgcactgaaactatccatgtgctcatctttctcccccactcatctaaaacaatggttataaatcaaaagtctggaggacttaacagatgagtgattatactaccagatataaggatatccttcacttctacaaagacatagtgtctgtctctccccttctgttttttgttcacagatgaggtctcaccctattgctcacgctggcctcacactcctgggcccaagctaacctcctgctcccacctcttgaatagctaggaccacagacgcacaggctgtgcccaatcctctccccttcttaaatcacatgatccctcttttctacctttcttctttcacttgatagaacataaaaatagaaaaacaaatacttcattttcctcttaaccctacttaaaggggaaaaaaaacctcaagctcaataacagatgcaatagacatcaaatttggtgtcaggaattagaaggaaatcatgaaggcatatgctaaggggggtaaccaagcactacttagctccaacatatggctgtctcttagaaagatttctaggtgtccagttttaaagagaagccagaaagttgggcttttatatgaaattccccaaatgttaattttgacaactcatttaaaattgttaaagacattgtttaagtccaaccaagcaaatctacccacacgattcattcagtccaggaagatcacatatttttaaactatgctctaagctctaagatacaggaaactactttagttcacctttatactgtaaactccacattcattacatctagaaagaaacccagaatttagctggactcttagcagatattttggcaaacaactgatgtattttgcagctaaactaagaatcgtatttttctttgtatacagaccacaatctctttatacctccatataaaaagattgcttcaaaggctacaaaaattctacaattacacctcttctaattgtaattctcctatgaatgtaaaaataagtattttaacaccacacttcctacagactcatctattcatttctttttactcttctgaatatgcccttaattatttcacctcttcctttttgcctccccattctgtttctcctttctactgaaataattttatatggactggatctctcacttttatttatctttttcttttcttttttttgagacagactcgccctatcgcccaggctggagtgcagtagtggaatctcggctcactgcaagctccgcctcctgggttcatgccattctcctgcctcagcctcctgagtagctgggactacaggcacccgccaccacgcctggctaattttttgtatttttagtagaggtggggtttcaccatgttagccaggatggtctcgatctcctgacctcgtgatccgcccgcctcagcctcccaaagtgctgggatgacaggcgtgagccaccatgcccggcctgtttatctttttcgaccataatatctcaggtctgaaaaacatataaacagactacatcaactgtggagacatttcaaattactaataacatttctatatctgtttaaggaataaaccaaaaaaattatagtggacaagaaagattatactgttaacagaaacagatttctaaaattaaaattaccaagagaatggtgaggaaggaattataaagtatggtacatggtaattgacactgtcctatattttactaaaacatttcaaggaataaggccaaacagaaaagtaaaaatttgataaaagtccaaatttaaatctatcccttccctaaagccaaaaactatgctaccacaataatggcctttttgaacatttcaaaaatttggaaatttatttttatttgcactaaaaaaacctatttaagtttaatactctagtaagaaagcacagtctaatggggtttacgcttacattcattatatcattaagtgaaaacaaatattgttcaaggtggatttgcaggatattttgttcaagttattgataatgcttttaatgtatgcttgtcataaaggaaaatacataattgtgtcatttaaagatgctcagggaccacttgtcaagcaatcaaaaatatatatgaagttaacaggtatctattaaatggctaaaaatataaaataatcttgaatgtgcagttaagggaaaagtaaactacttccattataaaaaaaaggaaaaacagaatgtataaatcagttccaaagacagactaaatgatgaaacacattcaaaatcccattctctttacatacctgtagacatcagttggcgactgtactaaagtgttatcttctccagaagagagtttccatgattcatttaatttgtgttcacttgtctccagctcacccagtacccaggctggtaatccctctgggcttgaaccttttgctcgtgctggatttggttcatcaaaatagatggactgattttttaaaattagaaaaattattctttcaaaatgtactataataaaccactaaaatttccatcaagtttcaagtttgaaaacagcctttcaaatactcaaattcaattacattcaaacatttaaaaaattaaatgtacattgaattatgagatattaaaatacattaagtgataacatatttacattttagttgcactctactgtctaagaaatacaataaacagaagtacataacagataaatctgatagtaatgtttatattactaaaggaatattagttaaatatgaaaagttaaatacaaagtttttaattatgtgccatcctatctctttctgtaatcactaactactttacatacacaaaaaaagaaatcagtgggatgagaaacacaaacagtgcaacccaggaattaaaattaggaatcccttgataaggtgggaacagcagagtgaaaaacctgggatttagttctggccacactgctaactagctgggaaacccaagagagttctctaaactttcacattattattatttgttaaataaagcccttccctttgattctatgaaattaagtgtgaatgggaaaacatgatacaatgtactcatatcttcacatctagatgtgcttcataaaatgttctacctttacacgtttctaaagaaaactctgcattgactgcacacctctgcaacaattctcccaatcctacagacagaatcctcaaggcactgttctttagggaggatgacacaagaccctccactccatatgggacatgcacagaaatttctttttaaatgacatagtcattaaaacttttggcattgtgccatggaaaacaggaattattctctaatgttcagcgtgccacttgactaaattgtgctttaagtaaactaataaaagttttaaaatacatgacacaagaattctgcagttcattaaaaaaatacatatatatcctaacagcaactatcaaagctaccaatacctagtactccagatttcttaagtacaggcactcaaataccaaacaaaccaaggtatattttatggttacaaggaccagggcagtgacaatttatccaccaagcataataataactgcctttgcaataaagctgattttgacaatgaaattaatttaagtacagaaaatgactttcaaactccattactgtcattttattagagtaaaaaggaacttttacaaatcatgcactccaacctctcataaacgtttaaataatatatatgaaagagtttaaaaactagaatttactgaattacgtaaaaattaccattacaatccagtgaaaattagcaaaaagtaaagctcaatataaaaaatttcgttttcagttttttagaaatactgttgaatactgaggcataactaaatcaataaggatactccccttataagcaatacatgtattttattaaaggtggaaaaaaattgaatcaggaagaaaaaaaacaattttaatatattatctagcacatacaacctaatagtattaccattccccaaagggatgataacttgacgcttttttttaaatgaaactaatatataccttttgttcattgatacctaccatgtatgaaggtagaatttttagtgtcccgggttcaggtcggtgtgtaaaagggccttcaagcgcacctcgtttaagcatatgcaataacaattttgcatacaggttccgattcttcctccccattattcctgcacctgttcctgaaggttcgcacagctttctaatccaaagagcacacctctgccgttctataaatacagaagaactattagaaattttattttttataaaatgaaacattcaattacaaagacctataatagcacctgctttagtctaaaagaaggaccaacaaaccttttctgttaaaggccagagagtatatactttaggcttcacaggccatatgatctctggcataactactctgccactgtagcatgaaagcactcagagaccataagtaaacaaatggcatgactatgttccaataaaacctggcaaaaaaagactgtgggcaggagttggcccatgggccattgtctgctaactcctggtctacaatttcactttattaggtaattggtaaatgagaaagacaaatgcaaagaaatattttctcaaaaataaaatctctagattatcattaaataactttaatttttaattattgtgagtacacagtagatatatatatttaggcagtacatgagatattttgatacaggcatgtaatgtataatagtcgcatcaggataaatcgggtatctatccatcacttcaagcatgtatcctctgtgttacaaacaatccaattatactcttagttatttttaaatatgccattaaattattagtgactgtagtcactctgttgtgctgtcaaatactaggtcgcattcactctatgtttttgtacccattaaccatccctacttcctccccacccatccttcccaccctctggaaaccatccttctatctccatgagttcagttgtcttaatttttagctcccacaaattagtaagaatatatgaagattgtctttctgtgcccagcttatttcacttaacataatgtcccccagttccagccatgttgttgcaaatgacagggtctcattatcttttatggctgaatagtactccattgtgtacatatatcacattttctttatccatttgtctgttgatggacacttaggttgcttccaaatcttggctattgtgaacagtgctgccacaaacatgggagtgcagatatctcttggatacactgatttcctttctttggggtatataactagcagtgggattgctggatcacatggtagctctattttctagtttttctgaggaacctcaaactcttctccgtagtcactccactaatttgcattaacaccaaaagtgtaggagagttaccttttctccacatccttgccagtgtttgttattgcctgtctttggataaaagccattttaactggggtgaaataatatctcactgcagtttttatctgcgttgctctgatgatcagtgatgttgaacatcttgtcacatgcctgtttgccatttgtatgtcttctattgagaaatgtctatttagatcttttgcccatttttaaatcagattatttgatttttttgtatagagttgtttgagctccttatatattctggttattcccttgtcagatgaatagtttgaaaagattttctctcattctctggattgtctcttcactttgttgatcgtttcctttgcagaagctttttaacatgatgagatcccatttgtccattgtcgctttggttgcctgtgcttttggagtattactcaagaaatctctgcccagaccactaccctggagattttccccaatgttttcttttagcagtttccttgtttgaggtcttagatttcagtctttaatccatttttatttttgtatatggtgggagacaagggtctagtttcattcttctgtatacggatattgaaaacttgatatccgtatacagaagaatgcctttaaaaatgtttgcatttttgctgtgaaaattacgtaatcacagaacaaactaatgaaatatcaggattactttgtacaagaagatacaaaagtgaaactgataaacttaagtaaatggcaccatttattgaagagactgtcatttccccagtgtaagtccttcacacctttgtcaaaaatgaaattcctgtaaatgtacggatttgt
